(19) United States
(12) Patent Application Publication
(10) Pub. No.: US 2024/0200140 A1
(43) Pub. Date: Jun. 20, 2024

(54) COMPOSITIONS AND METHODS FOR DIAGNOSING AND TREATING CANCER

(71) Applicant: The Regents of the University of California, Oakland, CA (US)

(72) Inventor: Daniel H. KIM, Santa Cruz, CA (US)

(73) Assignee: The Regents of the University of California, Oakland, CA (US)

(21) Appl. No.: 17/768,786

(22) PCT Filed: Oct. 19, 2020
(86) PCT No.: PCT/US2020/056316

§ 371 Date: Dec. 28, 2023

Related U.S. Application Data
(60) Provisional application No. 62/923,127, filed on Oct. 18, 2019.

(51) Int. Cl. C12Q 1/6886; A61K 45/06; C12Q 1/686

(52) U.S. Cl. CPC C12Q 1/6886; A61K 45/06; C12Q 1/686; C12Q 2600/106; C12Q 2600/158

(57) ABSTRACT

The disclosure provides methods for diagnosing and/or treating cancer in a subject by measuring the expression level of one or more genes listed in Tables 1-3 in a biological sample from the subject.

### BACKGROUND

[0001] Oncogenic KRAS is a potent initiator of tumorigenesis, yet its nascent effects on the noncoding genome are incompletely understood.

### SUMMARY

[0002] In one aspect, the disclosure features a method for diagnosing and/or treating cancer in a subject, the method comprising: analyzing the expression level of one or more genes in Tables 1-3 in a biological sample from the subject in conjunction with a corresponding reference level for the gene in a control sample from a control subject, wherein a differential expression level of the one or more genes in the biological sample from the subject compared to the corresponding reference level for the gene in the control sample from the control subject indicates that the subject has cancer.

[0003] In some embodiments, the method further comprises, prior to analyzing, measuring the expression level of the one or more genes in Tables 1-3 and the expression level of the corresponding reference level for the gene in the control sample. In some embodiments, the method further comprises, after analyzing, administering to the subject one or more anticancer agents. In certain embodiments, the anticancer agent is an inhibitor of a K-ras gene. In other embodiments, the anticancer agent is an inhibitor of the gene that is identified to have the differential expression level compared to the corresponding reference level for the gene in the control sample.

[0004] In some embodiments, the cancer comprises a KRAS mutation. The KRAS mutation can be in a tissue of the subject, such as lung tissue. In certain embodiments, the cancer is lung cancer, such as lung adenocarcinoma.

[0005] In some embodiments, the method comprises analyzing the expression level of a gene involved in the interferon (IFN) alpha or gamma response. In certain embodiments, an increase in the expression level of the gene involved in the IFN alpha or gamma response relative to a corresponding reference level for the gene in the control sample from the control subject indicates that the subject has cancer.

[0006] In some embodiments, the method comprises analyzing the expression level of a gene encoding a pattern recognition receptor (PRR). In certain embodiments, an increase in the expression level of the gene encoding the PRR relative to a corresponding reference level for the gene in the control sample from the control subject indicates that the subject has cancer. In some embodiments, the method comprises analyzing the expression level of a gene encoding cytosolic RNA sensor RIG-I or MDA5. In certain embodiments, an increase in the expression level of the gene encoding the cytosolic RNA sensor RIG-I or MDA5 relative to a corresponding reference level for the gene in the control sample from the control subject indicates that the subject has cancer.

[0007] In some embodiments, the method comprises analyzing the expression level of a gene encoding a KRAB zinc-finger (KZNF) protein. In certain embodiments, a decrease in the expression level of the gene encoding the KZNF protein relative to a corresponding reference level for the gene in the control sample from the control subject indicates that the subject has cancer.

[0008] In some embodiments, measuring the expression level of the one or more genes comprises performing polymerase chain reaction (PCR), reverse transcriptase polymerase chain reaction (RT-PCR), single-cell RNA-sequencing, microarray analysis, a Northern blot, serial analysis of gene expression (SAGE), immunoassay, hybridization capture, cDNA sequencing, direct RNA sequencing, nanopore sequencing, and/or mass spectrometry. Specifically, when PCR is used to measure the expression level, at least one set of oligonucleotide primers comprising a forward primer and a reverse primer capable of amplifying a polynucleotide sequence of the gene can be used.

[0009] In some embodiments, the biological sample is a blood sample, a urine sample, or a tissue sample (e.g., a blood sample). In some embodiments, the subject suspected of having cancer or in need of treatment is a mammal (e.g., a human).

[0010] In another aspect, the disclosure also features a biomarker panel comprising two or more genes listed in Tables 1-3.

### Definitions

[0011] As used herein, the term “KRAS mutation” refers to a genetic mutation in the K-ras gene, which acts as an on-off switch in cell signaling and controls cell proliferation.

[0012] As used herein, the term “long noncoding RNA” or “lncRNA” refers to RNA polynucleotides that are not translated into proteins. Long ncRNAs may vary in length from several hundred bases to tens of kilo bases (e.g., at least 100, 200, 300, 400, 500, 600, 700, 800, 900, 1000, 1100, 1200, 1300, 1400, 1500, 1600, 1700, 1800, 1900, or 2000 bases) and may be located separately from protein coding genes, or reside near or within protein coding genes.

[0013] As used herein, the term “polynucleotide” refers to an oligonucleotide, or nucleotide, and fragments or portions thereof, and to DNA or RNA of genomic or synthetic origin, which may be single- or double-stranded, and represent the sense or anti-sense strand. A single polynucleotide is translated into a single polypeptide.

[0014] As used herein, the terms “peptide” and “polypeptide” are used interchangeably and describe a single polymer in which the monomers are amino acid residues which are joined together through amide bonds. A polypeptide is intended to encompass any amino acid sequence, either naturally occurring, recombinant, or synthetically produced.

[0015] As used herein, the term “substantial identity” or “substantially identical,” used in the context of nucleic acids or polypeptides, refers to a sequence that has at least 50% sequence identity with a reference sequence. Alternatively, percent identity can be any integer from 50% to 100%. In some embodiments, a sequence is substantially identical to a reference sequence if the sequence has at least 50%, 55%, 60%, 65%, 70%, 75%, 80%, 85%, 90%, 91%, 92%, 93%, 94%, 95%, 96%, 97%, 98%, or 99% sequence identity to the reference sequence as determined using, e.g., BLAST.

[0016] For sequence comparison, typically one sequence acts as a reference sequence, to which test sequences are compared. When using a sequence comparison algorithm, test and reference sequences are entered into a computer, subsequence coordinates are designated, if necessary, and sequence algorithm program parameters are designated. Default program parameters can be used, or alternative parameters can be designated. The sequence comparison algorithm then calculates the percent sequence identities for the test sequences relative to the reference sequence, based on the program parameters.

[0017] A comparison window includes reference to a segment of any one of the number of contiguous positions, e.g., a segment of at least 10 residues. In some embodiments, the comparison window has from 10 to 600 residues, e.g., about 10 to about 30 residues, about 10 to about 20 residues, about 50 to about 200 residues, or about 100 to about 150 residues, in which a sequence may be compared to a reference sequence of the same number of contiguous positions after the two sequences are optimally aligned.

[0018] Algorithms that are suitable for determining percent sequence identity and sequence similarity are the BLAST and BLAST 2.0 algorithms, which are described in Altschul et al. (1990) J. Mol. Biol. 215: 403-410 and Altschul et al. (1977) Nucleic Acids Res. 25: 3389-3402, respectively. Software for performing BLAST analyses is publicly available through the National Center for Biotechnology Information (NCBI) web site. The algorithm involves first identifying high scoring sequence pairs (HSPs) by identifying short words of length W in the query sequence, which either match or satisfy some positive-valued threshold score T when aligned with a word of the same length in a database sequence. T is referred to as the neighborhood word score threshold (Altschul et al. supra). These initial neighborhood word hits act as seeds for initiating searches to find longer HSPs containing them. The word hits are then extended in both directions along each sequence for as far as the cumulative alignment score can be increased. Cumulative scores are calculated using, for nucleotide sequences, the parameters M (reward score for a pair of matching residues; always >0) and N (penalty score for mismatching residues; always <0)). For amino acid sequences, a scoring matrix is used to calculate the cumulative score. Extension of the word hits in each direction are halted when: the cumulative alignment score falls off by the quantity X from its maximum achieved value; the cumulative score goes to zero or below, due to the accumulation of one or more negative-scoring residue alignments; or the end of either sequence is reached. The BLAST algorithm parameters W, T, and X determine the sensitivity and speed of the alignment. The BLASTN program (for nucleotide sequences) uses as defaults a word size (W) of 28, an expectation (E) of 10, M=1, N=−2, and a comparison of both strands. For amino acid sequences, the BLASTP program uses as defaults a word size (W) of 3, an expectation (E) of 10, and the BLOSUM62 scoring matrix (see Henikoff & Henikoff, Proc. Natl. Acad. Sci. USA 89:10915 (1989)).

[0019] The BLAST algorithm also performs a statistical analysis of the similarity between two sequences (see, e.g., Karlin & Altschul, Proc. Nat'l. Acad. Sci. USA 90:5873-5787 (1993)). One measure of similarity provided by the BLAST algorithm is the smallest sum probability (P(N)), which provides an indication of the probability by which a match between two nucleotide or amino acid sequences would occur by chance. For example, an amino acid sequence is considered similar to a reference sequence if the smallest sum probability in a comparison of the test amino acid sequence to the reference amino acid sequence is less than about 0.01, more preferably less than about 10⁻⁵, and most preferably less than about 10⁻²⁰.

### BRIEF DESCRIPTION OF THE DRAWINGS

[0020] FIGS. 1A-ID. Tissue-specific transcriptome reprogramming by mutant KRAS. (A) Chromosome-level distribution of differentially expressed RNAs in mutant KRAS lung epithelial cells (AALE). Shown are the two most abundant biotypes from RNA-seq data. (B) Gene set enrichment analysis (GSEA) pathways sorted by normalized enrichment score (NES) in mutant KRAS lung epithelial cells. (C) Chromosome-level distribution of differentially expressed RNAs in mutant KRAS kidney cells (HA1E). (D) GSEA pathways sorted by NES in mutant KRAS kidney cells.

[0021] FIGS. 2A-2E. Mutant KRAS activates IFN-related genes and transposable elements. Differentially expressed interferon-stimulated genes in (A) mutant KRAS lung epithelial cells and (B) mutant KRAS kidney cells. (C) Cell viability in mutant KRAS lung epithelial cells transfected with indicated small interfering RNAs. Differentially expressed transposable elements in (D) mutant KRAS lung epithelial cells and (E) mutant KRAS kidney cells.

[0022] FIGS. 3A-3F. Coordinate regulation of IFN-related genes and transposable elements. Uniform manifold approximation and projection (UMAP) visualization of single-cell RNA-seq (scRNA-seq) data from mutant KRAS lung epithelial cells showing (A) clustering and expression of (B) IFN beta and (C) RIG-I/MDA5 metagenes. (D-F) Correlations between transposable elements and IFN-related metagenes in scRNA-seq clusters.

[0023] FIGS. 4A-4G. Broad suppression of KRAB zinc finger proteins in lung cancer cells. Differentially expressed zinc finger proteins in (A) mutant KRAS lung epithelial cells and (B) mutant KRAS kidney cells. ChIP-seq data from indicated zinc finger proteins showing binding to the consensus sequences of (C) THE1D, (D) MER20, and (E) L1MC4a. (F) Significantly repressed zinc finger proteins in mutant KRAS lung adenocarcinomas compared to matched normal lung samples and (G) their corresponding expression levels in kidney cancers compared to matched normal kidney samples.

[0024] FIGS. 5A-5D. Transcriptome reprogramming by mutant KRAS. (A) Chromosome-level distribution of differentially expressed RNAs in mutant lung epithelial cells. (B) Proportion of exons that overlap a transposable element (TE) for all genes detected and differentially expressed in mutant lung epithelial cells, separated by biotype. (C) Chromosome-level distribution of differentially expressed RNAs in mutant kidney cells. (D) Proportion of exons that overlap a transposable element (TE) for all genes detected and differentially expressed in mutant kidney cells, separated by biotype.

[0025] FIGS. 6A-6D. Interferon-stimulated gene expression heterogeneity in transformed cells. Uniform manifold approximation and projection (UMAP) visualization of single-cell RNA-seq data from mutant KRAS lung epithelial cells showing expression of indicated metagenes.

### DETAILED DESCRIPTION OF THE EMBODIMENTS

### I. Introduction

[0026] Most of the human genome is noncoding and transcribed into RNA (1, 2), but how the noncoding transcriptome contributes to cancer formation is poorly understood. About half of the human genome is comprised of transposable elements (TE) (3), whose expression patterns are often altered in cancer (4). Additionally, TEs contribute substantially to the noncoding transcriptome and are present in the exonic sequences of thousands of long noncoding RNAs (lncRNAs) and other classes of regulatory RNAs (5). Noncoding RNA networks become disrupted in cancer (6, 7) and epigenetic reprogramming, where early activation of RAS signaling leads to coordinate activation of noncoding RNAs in single cells (8). While RAS genes are among the most frequently mutated oncogenes in cancer (9), the extent to which RAS regulates the noncoding transcriptome during cellular transformation remains unknown.

[0027] To determine the landscape of noncoding RNAs affected by oncogenic RAS signaling, we performed RNA sequencing (RNA-seq) on human lung epithelial cells (AALE) that undergo malignant transformation upon introduction of mutant KRAS (10). We compared the transcriptomes of AALE cells transduced with control vector to AALEs that were transformed by mutant KRAS and analyzed the distribution of differentially expressed transcripts across the genome.

### II. Transcriptome Affected by Oncogenic RAS Signaling

[0028] We analyzed the transcriptomes of human lung and kidney cells transformed with mutant KRAS to define the landscape of RAS-regulated noncoding RNAs. We found that oncogenic RAS upregulates noncoding transcripts throughout the genome, many of which arise from transposable elements. These repetitive sequences are preferential targets of KRAB zinc-finger proteins, which are broadly downregulated in mutant KRAS cells and lung adenocarcinomas. Moreover, KRAS-mediated reprogramming of repetitive noncoding RNA induces an interferon response that contributes to cellular transformation. The results reveal the extent to which mutant KRAS remodels the noncoding transcriptome, expanding the scope of genomic elements regulated by this fundamental signaling pathway.

[0029] Tables 1-3 below list genes whose expression levels are found to be altered by mutant KRAS. The disclosure relates to the genes listed in Tables 1-3 and their diagnostic and therapeutic uses for cancer (e.g., lung cancer). In some embodiments, one or more genes disclosed herein have a differential expression induced by mutant KRAS. As described herein, dynamic changes in the transcriptome were observed in AALE cells transformed by mutant KRAS. Furthermore, the expression of some genes were found to be specifically induced by mutant KRAS in cells from a given tissue type. These results reveal that KRAS-induced genetic signatures are tissue-specific. In some embodiments of the compositions and methods described herein, a plurality of the genes listed in Tables 1-3 can be used to identify KRAS mutations in a tissue specific manner, leading to potentially identifying and diagnosing various types of cancer in their early stages and applying appropriate treatments.

TABLE 1
Intron Biomarkers

| | | | | | | | | | p- | | |
|---|---|---|---|---|---|---|---|---|---|---|---|
| enst | chromosome | start.position | end.position | strand | transcript.id | gene | len | log2FoldChange | value | biotype | genome |
| ENST000005 | 14 | 100361703 | 100375473 | − | WARS- | WARS | 582 | 3.293972806 | 0.000854 | retained- | hg38 |
| 57094.5 | | | | | 237 | | | | | intron | |
| ENST000005 | 5 | 146261383 | 146263519 | + | RBM27- | RBM27 | 453 | 3.137712098 | 0.004569 | retained- | hg38 |
| 08019.1 | | | | | 202 | | | | | intron | |
| ENST000004 | 1 | 148290889 | 148296776 | − | LINC01138- | LINC01138 | 1143 | 1.934244609 | 6.08E−06 | retained- | hg38 |
| 45201.2 | | | | | 203 | | | | | intron | |
| ENST000005 | 5 | 73058421 | 73077440 | + | FCHO2- | FCHO2 | 553 | 1.927973168 | 0.00896 | retained- | hg38 |
| 08431.1 | | | | | 205 | | | | | intron | |
| ENST000005 | 1 | 169303100 | 169367782 | − | NME7- | NME7 | 557 | 1.843357221 | 0.024478 | retained- | hg38 |
| 27460.1 | | | | | 212 | | | | | intron | |
| ENST000004 | 17 | 30477417 | 30490350 | + | GOSR1- | GOSR1 | 584 | 1.841994189 | 0.025001 | retained- | hg38 |
| 67635.6 | | | | | 206 | | | | | intron | |
| ENST000004 | 7 | 99498585 | 99499704 | − | ZNF394- | ZNF394 | 325 | 1.809825585 | 0.011592 | retained- | hg38 |
| 64401.1 | | | | | 205 | | | | | intron | |
| ENST000005 | 5 | 34914477 | 34915504 | − | RAD1- | RAD1 | 574 | 1.796670164 | 0.041416 | retained- | hg38 |
| 06311.1 | | | | | 204 | | | | | intron | |
| ENST000004 | 2 | 110642114 | 110678028 | − | BUB1-207 | BUB1 | 2501 | 1.784091007 | 0.003847 | retained- | hg38 |
| 66333.5 | | | | | | | | | | intron | |
| ENST000005 | 4 | 150265026 | 150315634 | − | LRBA- | LRBA | 1636 | 1.77019687 | 0.007722 | retained- | hg38 |
| 10157.1 | | | | | 208 | | | | | intron | |
| ENST000006 | 1 | 155191863 | 155192909 | − | MUC1- | MUC1 | 572 | 1.730092884 | 0.009695 | retained- | hg38 |
| 20770.1 | | | | | 229 | | | | | intron | |
| ENST000004 | 1 | 114720216 | 114726348 | − | CSDE1- | CSDE1 | 873 | 1.601512932 | 0.015137 | retained- | hg38 |
| 83030.1 | | | | | 206 | | | | | intron | |
| ENST000005 | 17 | 4968139 | 4969081 | − | CAMTA2- | CAMTA2 | 856 | 1.556293725 | 4.97E−05 | retained- | hg38 |
| 72192.1 | | | | | 206 | | | | | intron | |
| ENST000005 | 17 | 4734583 | 4738539 | − | CXCL16- | CXCL16 | 619 | 1.459348853 | 0.049021 | retained- | hg38 |
| 75168.1 | | | | | 204 | | | | | intron | |
| ENST000004 | 9 | 128120752 | 128125253 | − | PTGES2- | PTGES2 | 1514 | 1.358396555 | 0.036463 | retained- | hg38 |
| 93205.5 | | | | | 211 | | | | | intron | |
| ENST000005 | 1 | 1629106 | 1630603 | + | MIB2-227 | MIB2 | 584 | 1.3503614 | 0.001572 | retained- | hg38 |
| 11910.1 | | | | | | | | | | intron | |
| ENST000005 | 1 | 1615514 | 1630604 | + | MIB2-226 | MIB2 | 3326 | 1.292032367 | 0.030268 | retained- | hg38 |
| 11502.5 | | | | | | | | | | intron | |
| ENST000004 | 22 | 40408388 | 40410047 | + | SGSM3- | SGSM3 | 1029 | 1.230036111 | 0.017716 | retained- | hg38 |
| 69719.5 | | | | | 207 | | | | | intron | |
| ENST000004 | 3 | 184319625 | 184321534 | + | EIF4G1- | EIF4G1 | 590 | 1.228742301 | 0.044799 | retained- | hg38 |
| 84862.5 | | | | | 236 | | | | | intron | |
| ENST000005 | 9 | 22005203 | 22006271 | − | CDKN2B- | CDKN2B | 1069 | 1.11814584 | 1.15E−06 | retained- | hg38 |
| 79591.1 | | | | | 203 | | | | | intron | |
| ENST000004 | 15 | 99136406 | 99221864 | − | TTC23- | TTC23 | 2952 | 1.069833641 | 0.032316 | retained- | hg38 |
| 94567.1 | | | | | 211 | | | | | intron | |
| ENST000004 | 11 | 1834310 | 1837521 | + | SYT8-209 | SYT8 | 1956 | 1.063723564 | 0.000806 | retained- | hg38 |
| 79089.5 | | | | | | | | | | intron | |
| ENST000004 | 21 | 43053191 | 43068404 | − | CBS-209 | CBS | 2656 | 1.025934645 | 0.020483 | retained- | hg38 |
| 61686.5 | | | | | | | | | | intron | |
| ENST000003 | 20 | 63570139 | 63574239 | − | HELZ2- | HELZ2 | 1827 | 1.025633626 | 0.000139 | retained- | hg38 |
| 70082.1 | | | | | 201 | | | | | intron | |
| ENST000005 | 5 | 134388138 | 134390605 | + | UBE2B- | UBE2B | 657 | 1.011036613 | 0.013832 | retained- | hg38 |
| 03080.1 | | | | | 203 | | | | | intron | |
| ENST000005 | 11 | 57741699 | 57743514 | + | SELENOH- | SELENOH | 1039 | 1.005915525 | 0.041306 | retained- | hg38 |
| 34386.2 | | | | | 205 | | | | | intron | |
| ENST000005 | 5 | 178208654 | 178230320 | − | PHYKPL- | PHYKPL | 814 | 1.005802616 | 0.034591 | retained- | hg38 |
| 10991.5 | | | | | 216 | | | | | intron | |
| ENST000004 | 6 | 27251213 | 27255908 | + | PRSS16- | PRSS16 | 1002 | 1.000739737 | 0.031397 | retained- | hg38 |
| 92575.5 | | | | | 219 | | | | | intron | |

TABLE 2
Protein Coding Biomakers

| | chromo- | | | | | | | | p- | | |
|---|---|---|---|---|---|---|---|---|---|---|---|
| enst | some | start.position | end.position | strand | transcript.id | gene | len | log2FoldChange | value | biotype | genome |
| ENST00000361 | 1 | 27666061 | 27672218 | − | IFI6-202 | IFI6 | 841 | 3.75726403 | 9.48E−07 | protein- | hg38 |
| 157.10 | | | | | | | | | | coding | |
| ENST00000649 | 16 | 86566829 | 86569728 | + | FOXC2-202 | FOXC2 | 2900 | 3.738134499 | 2.35E−07 | protein- | hg38 |
| 859.1 | | | | | | | | | | coding | |
| ENST00000256 | 12 | 25209431 | 25250803 | − | KRAS-201 | KRAS | 1119 | 3.688899635 | 3.8E−05 | protein- | hg38 |
| 078.8 | | | | | | | | | | coding | |
| ENST00000261 | 12 | 20815672 | 20916911 | + | SLCO1B3- | SLCO1B3 | 2840 | 3.509148933 | 1.09E−06 | protein- | hg38 |
| 196.6 | | | | | 201 | | | | | coding | |
| ENST00000524 | 6 | 99545168 | 99568227 | − | CCNC-218 | CCNC | 759 | 3.428836274 | 0.0023 | protein- | hg38 |
| 049.5 | | | | | | | | | | coding | |
| ENST00000275 | X | 34627064 | 34657288 | − | TMEM47- | TMEM47 | 4054 | 3.345762035 | 1.43E−08 | protein- | hg38 |
| 954.3 | | | | | 201 | | | | | coding | |
| ENST00000371 | 10 | 89392546 | 89403988 | + | IFIT1-201 | IFIT1 | 1880 | 3.296687078 | 1.29E−09 | protein- | hg38 |
| 804.3 | | | | | | | | | | coding | |
| ENST00000320 | 16 | 86567251 | 86569728 | + | FOXC2-201 | FOXC2 | 2478 | 3.164092038 | 0.00395 | protein- | hg38 |
| 354.5 | | | | | | | | | | coding | |
| ENST00000327 | 12 | 52285913 | 52291534 | − | KRT81-201 | KRT81 | 1929 | 3.12422172 | 2.5E−08 | protein- | hg38 |
| 741.9 | | | | | | | | | | coding | |
| ENST00000371 | 10 | 89301955 | 89309276 | + | IFIT2-201 | IFIT2 | 3489 | 3.107028696 | 1.64E−07 | protein- | hg38 |
| 826.3 | | | | | | | | | | coding | |
| ENST00000341 | 11 | 1834804 | 1837521 | + | SYT8-201 | SYT8 | 1556 | 3.057400577 | 0.00045 | protein- | hg38 |
| 958.3 | | | | | | | | | | coding | |
| ENST00000398 | 21 | 41426167 | 41459214 | + | MX1-202 | MX1 | 2850 | 2.965414141 | 0.000954 | protein- | hg38 |
| 598.7 | | | | | | | | | | coding | |
| ENST00000257 | 12 | 121019111 | 121039242 | − | OASL-201 | OASL | 3266 | 2.963031748 | 1.16E−07 | protein- | hg38 |
| 570.9 | | | | | | | | | | coding | |
| ENST00000370 | 1 | 78649831 | 78664078 | + | IFI44-201 | IFI44 | 1687 | 2.94788013 | 1.94E−07 | protein- | hg38 |
| 747.8 | | | | | | | | | | coding | |
| ENST00000508 | 5 | 94708549 | 95081645 | − | MCTP1- | MCTP1 | 2214 | 2.832339587 | 0.00874 | protein- | hg38 |
| 509.5 | | | | | 209 | | | | | coding | |
| ENST00000621 | 14 | 94110749 | 94116695 | + | IFI27-215 | IFI27 | 644 | 2.826852134 | 0.000734 | protein- | hg38 |
| 160.4 | | | | | | | | | | coding | |
| ENST00000649 | 1 | 1013497 | 1014540 | + | ISG15-204 | ISG15 | 637 | 2.786256252 | 4.44E−10 | protein- | hg38 |
| 529.1 | | | | | | | | | | coding | |
| ENST00000339 | 12 | 121020557 | 121039156 | − | OASL-202 | OASL | 1492 | 2.774555087 | 0.00099 | protein- | hg38 |
| 275.9 | | | | | | | | | | coding | |
| ENST00000424 | 6 | 31647604 | 31652667 | − | BAG6-240 | BAG6 | 1056 | 2.772644748 | 0.006213 | protein- | hg38 |
| 480.5 | | | | | | | | | | coding | |
| ENST00000371 | 10 | 89327894 | 89340971 | + | IFIT3-202 | IFIT3 | 2496 | 2.747204085 | 0.006352 | protein- | hg38 |
| 818.8 | | | | | | | | | | coding | |
| ENST00000362 | 1 | 27666066 | 27672198 | − | IFI6-203 | IFI6 | 828 | 2.722538533 | 0.002499 | protein- | hg38 |
| 020.4 | | | | | | | | | | coding | |
| ENST00000566 | 16 | 1533573 | 1555580 | + | TMEM204- | TMEM204 | 1938 | 2.69851486 | 7.25E−05 | protein- | hg38 |
| 264.1 | | | | | 202 | | | | | coding | |
| ENST00000367 | 1 | 196651878 | 196747504 | + | CFH-202 | CFH | 4127 | 2.646360432 | 5.511-08 | protein- | hg38 |
| 429.8 | | | | | | | | | | coding | |
| ENST00000371 | 1 | 47023568 | 47050751 | + | CYP4X1- | CYP4X1 | 2357 | 2.642345543 | 6.06E−06 | protein- | hg38 |
| 901.3 | | | | | 201 | | | | | coding | |
| ENST00000255 | 11 | 63536821 | 63546462 | + | RARRES3- | RARRES3 | 749 | 2.588686336 | 0.000117 | protein- | hg38 |
| 688.7 | | | | | 201 | | | | | coding | |
| ENST00000370 | 1 | 85652808 | 85708418 | − | ZNHIT6 | ZNHIT6 | 2797 | 2.571831117 | 1.01E−09 | protein- | hg38 |
| 574.3 | | | | | 201 | | | | | coding | |
| ENST00000611 | 10 | 89302046 | 89308919 | + | IFIT2-202 | IFIT2 | 3038 | 2.526327895 | 8.19E−07 | protein- | hg38 |
| 722.1 | | | | | | | | | | coding | |
| ENST00000264 | 4 | 88457117 | 88506163 | + | HERC5-201 | HERC5 | 3513 | 2.503694262 | 1.84E−08 | protein- | hg38 |
| 350.7 | | | | | | | | | | coding | |
| ENST00000349 | 2 | 227325276 | 227357812 | + | MFF-203 | MFF | 1716 | 2.406702952 | 0.00163 | protein- | hg38 |
| 901.11 | | | | | | | | | | coding | |
| ENST00000645 | 1 | 6424776 | 6460944 | + | ESPN-218 | ESPN | 3543 | 2.394876462 | 0.000459 | protein- | hg38 |
| 284.1 | | | | | | | | | | coding | |
| ENST00000429 | 5 | 94706579 | 95081645 | − | MCTP1- | MCTP1 | 3159 | 2.370601632 | 6.59E−06 | protein- | hg38 |
| 576.6 | | | | | 202 | | | | | coding | |
| ENST00000339 | 1 | 1512530 | 1534685 | + | ATAD3A- | ATAD3A | 2330 | 2.312568468 | 0.003414 | protein- | hg38 |
| 113.8 | | | | | 201 | | | | | coding | |
| ENST00000360 | 16 | 55802853 | 55833158 | − | CES1-201 | CES1 | 2006 | 2.312212075 | 8.64E−05 | protein- | hg38 |
| 526.7 | | | | | | | | | | coding | |
| ENST00000618 | 14 | 94110747 | 94116447 | + | IFI27-211 | IFI27 | 364 | 2.305518338 | 0.001392 | protein- | hg38 |
| 200.4 | | | | | | | | | | coding | |
| ENST00000514 | 5 | 33440739 | 33453346 | + | TARS-214 | TARS | 466 | 2.252059871 | 0.025226 | protein- | hg38 |
| 259.5 | | | | | | | | | | coding | |
| ENST00000371 | 10 | 89332484 | 89340971 | + | IFIT3-201 | IFIT3 | 2455 | 2.193840753 | 0.006943 | protein- | hg38 |
| 811.4 | | | | | | | | | | coding | |
| ENST00000555 | 14 | 75279643 | 75281684 | + | FOS-208 | FOS | 1496 | 2.157727932 | 1.96E−05 | protein- | hg38 |
| 686.1 | | | | | | | | | | coding | |
| ENST00000649 | 2 | 162267079 | 162318652 | − | IFIH1-207 | IFIH1 | 3544 | 2.155055238 | 0.00378 | protein- | hg38 |
| 979.1 | | | | | | | | | | coding | |
| ENST00000349 | 4 | 102797264 | 102827849 | − | UBE2D3- | UBE2D3 | 838 | 2.112175875 | 0.031604 | protein- | hg38 |
| 311.12 | | | | | 204 | | | | | coding | |
| ENST00000368 | 6 | 122610232 | 122725892 | + | PKIB-205 | PKIB | 1398 | 2.069071583 | 0.001777 | protein- | hg38 |
| 452.6 | | | | | | | | | | coding | |
| ENST00000603 | 17 | 35871491 | 35880508 | − | CCL5-201 | CCL5 | 1365 | 2.067195368 | 0.002275 | protein- | hg38 |
| 197.5 | | | | | | | | | | coding | |
| ENST00000265 | 11 | 68754889 | 68841916 | − | CPT1A-201 | CPT1A | 5232 | 2.02881839 | 1.61E−07 | protein- | hg38 |
| 641.9 | | | | | | | | | | coding | |
| ENST00000396 | 14 | 24161053 | 24166565 | + | IRF9-202 | IRF9 | 1838 | 2.020578106 | 0.000772 | protein- | hg38 |
| 864.7 | | | | | | | | | | coding | |
| ENST00000635 | 15 | 63153853 | 63157477 | − | RPS27L- | RPS27L | 693 | 2.011919702 | 0.005308 | protein- | hg38 |
| 699.1 | | | | | 208 | | | | | coding | |
| ENST00000620 | 14 | 94110815 | 94116698 | + | IFI27-213 | IFI27 | 719 | 2.010270782 | 0.00134 | protein- | hg38 |
| 066.1 | | | | | | | | | | coding | |
| ENST00000402 | 4 | 165378942 | 165498320 | + | CPE−201 | CPE | 2421 | 2.006566553 | 2.7E−09 | protein- | hg38 |
| 744.8 | | | | | | | | | | coding | |
| ENST00000555 | 14 | 75280193 | 75281587 | + | FOS-206 | FOS | 1280 | 1.981480408 | 2.5E−06 | protein- | hg38 |
| 347.1 | | | | | | | | | | coding | |
| ENST00000618 | 14 | 94110734 | 94116690 | + | IFI27-212 | IFI27 | 505 | 1.952488836 | 0.005933 | protein- | hg38 |
| 863.1 | | | | | | | | | | coding | |
| ENST00000644 | 4 | 153684278 | 153705378 | + | TLR2-206 | TLR2 | 2716 | 1.939352526 | 0.033911 | protein- | hg38 |
| 308.1 | | | | | | | | | | coding | |
| ENST00000577 | 17 | 47650358 | 47658641 | + | KPNB1-204 | KPNB1 | 605 | 1.926684917 | 0.037346 | protein- | hg38 |
| 875.5 | | | | | | | | | | coding | |
| ENST00000395 | 16 | 28537537 | 28539008 | − | NUPR1-202 | NUPR1 | 550 | 1.923381458 | 2.37E−08 | protein- | hg38 |
| 641.2 | | | | | | | | | | coding | |
| ENST00000264 | 4 | 23792021 | 23890077 | − | PPARGC1A- | PPARG | 6318 | 1.92147295 | 3.09E−05 | protein- | hg38 |
| 867.6 | | | | | 201 | CIA | | | | coding | |
| ENST00000397 | 1 | 41027200 | 41152674 | − | SCMH1- | SCMHI | 2977 | 1.90247111 | 0.005399 | protein- | hg38 |
| 174.6 | | | | | 209 | | | | | coding | |
| ENST00000593 | 19 | 46716165 | 46717112 | − | PRKD2-203 | PRKD2 | 669 | 1.893650203 | 0.029658 | protein- | hg38 |
| 363.1 | | | | | | | | | | coding | |
| ENST00000264 | 4 | 88378863 | 88443111 | + | HERC6-201 | HERC6 | 3779 | 1.886218536 | 5.67E−07 | protein- | hg38 |
| 346.11 | | | | | | | | | | coding | |
| ENST00000554 | 14 | 75278826 | 75280374 | + | FOS-204 | FOS | 796 | 1.883078887 | 0.000123 | protein- | hg38 |
| 617.1 | | | | | | | | | | coding | |
| ENST00000539 | 11 | 68757613 | 68815503 | − | CPT1A-205 | CPT1A | 2382 | 1.877494669 | 0.014155 | protein- | hg38 |
| 743.5 | | | | | | | | | | coding | |
| ENST00000382 | 2 | 6877665 | 6898239 | + | RSAD2-201 | RSAD2 | 3519 | 1.866944846 | 4.97E−06 | protein- | hg38 |
| 040.3 | | | | | | | | | | coding | |
| ENST00000560 | 15 | 88636153 | 88655621 | + | ISG20-210 | ISG20 | 800 | 1.8559211 | 2.37E−08 | protein- | hg38 |
| 741.5 | | | | | | | | | | coding | |
| ENST00000439 | 18 | 59430939 | 59697423 | − | CCBE1-202 | CCBE1 | 6271 | 1.848695376 | 0.001875 | protein- | hg38 |
| 986.9 | | | | | | | | | | coding | |
| ENST00000611 | 1 | 155185826 | 155192915 | − | MUC1-223 | MUC1 | 4170 | 1.830573122 | 1.47E−05 | protein- | hg38 |
| 571.4 | | | | | | | | | | coding | |
| ENST00000449 | 15 | 72199029 | 72231386 | − | PKM-204 | PKM | 2526 | 1.82190888 | 0.032014 | protein- | hg38 |
| 901.6 | | | | | | | | | | coding | |
| ENST00000225 | 17 | 19737984 | 19748433 | − | ALDH3A1- | ALDH3A1 | 1779 | 1.818651351 | 0.011605 | protein- | hg38 |
| 740.10 | | | | | 201 | | | | | coding | |
| ENST00000238 | 1 | 236523873 | 236544815 | + | LGALS8- | LGALS8 | 819 | 1.812904519 | 0.007013 | protein- | hg38 |
| 181.11 | | | | | 201 | | | | | coding | |
| ENST00000361 | 16 | 55803049 | 55833186 | − | CES1-202 | CES1 | 1835 | 1.805021916 | 0.000405 | protein- | hg38 |
| 503.8 | | | | | | | | | | coding | |
| ENST00000515 | 5 | 94705100 | 95284575 | − | MCTP1- | MCTP1 | 5396 | 1.798059507 | 9.07E−05 | protein- | hg38 |
| 393.5 | | | | | 218 | | | | | coding | |
| ENST00000431 | 1 | 85649423 | 85708433 | − | ZNHIT6- | ZNHIT6 | 6080 | 1.794909874 | 2.51E−07 | protein- | hg38 |
| 532.6 | | | | | 202 | | | | | coding | |
| ENST00000511 | 4 | 182243429 | 182803024 | + | TENM3- | TENM3 | 10896 | 1.793430257 | 3.73E−08 | protein- | hg38 |
| 685.5 | | | | | 204 | | | | | coding | |
| ENST00000233 | 2 | 187464261 | 187554492 | − | TFPI-201 | TFPI | 3885 | 1.793373089 | 0.000747 | protein- | hg38 |
| 156.8 | | | | | | | | | | coding | |
| ENST00000393 | 4 | 168216293 | 168318807 | − | DDX60-201 | DDX60 | 6071 | 1.791330976 | 1.8E−08 | protein- | hg38 |
| 743.7 | | | | | | | | | | coding | |
| ENST00000393 | 14 | 94612377 | 94624052 | + | SERPINA3- | SERPINA3 | 1589 | 1.785023983 | 0.022336 | protein- | hg38 |
| 078.4 | | | | | 201 | | | | | coding | |
| ENST00000553 | 14 | 30622329 | 30650626 | + | SCFD1-210 | SCFD1 | 490 | 1.78429222 | 0.032027 | protein- | hg38 |
| 693.5 | | | | | | | | | | coding | |
| ENST00000642 | 4 | 153684265 | 153705702 | + | TLR2-202 | TLR2 | 2979 | 1.781685949 | 0.021563 | protein- | hg38 |
| 580.1 | | | | | | | | | | coding | |
| ENST00000525 | 11 | 105026209 | 105035149 | − | CASP1-204 | CASP1 | 1237 | 1.78165249 | 0.001462 | protein- | hg38 |
| 825.5 | | | | | | | | | | coding | |
| ENST00000381 | 11 | 1834590 | 1837521 | + | SYT8-203 | SYT8 | 1291 | 1.778062994 | 0.02412 | protein- | hg38 |
| 978.7 | | | | | | | | | | coding | |
| ENST00000379 | 9 | 32455705 | 32526324 | − | DDX58-202 | DDX58 | 4353 | 1.77622664 | 2.12E−07 | protein- | hg38 |
| 883.2 | | | | | | | | | | coding | |
| ENST00000324 | 16 | 28532708 | 28539174 | − | NUPR1-201 | NUPR1 | 5491 | 1.755858563 | 4.32E−09 | protein- | hg38 |
| 873.7 | | | | | | | | | | coding | |
| ENST00000613 | 4 | 23795339 | 23881292 | − | PPARGC1A- | PPARGC1A | 3210 | 1.748036663 | 2.79E−05 | protein- | hg38 |
| 098.4 | | | | | 217 | | | | | coding | |
| ENST00000512 | 5 | 69365357 | 69369477 | − | TAF9-208 | TAF9 | 582 | 1.742712635 | 0.047163 | protein- | hg38 |
| 152.5 | | | | | | | | | | coding | |
| ENST00000252 | 19 | 1397026 | 1401553 | − | GAMT-201 | GAMT | 1121 | 1.732524279 | 0.00017 | protein- | hg38 |
| 288.7 | | | | | | | | | | coding | |
| ENST00000640 | 1 | 99970013 | 100023453 | + | SLC35A3- | SLC35A3 | 1989 | 1.714093381 | 0.002019 | protein- | hg38 |
| 715.1 | | | | | 222 | | | | | coding | |
| ENST00000392 | 12 | 112978402 | 113011718 | − | OAS2-202 | OAS2 | 4734 | 1.705468162 | 6.08E−06 | protein- | hg38 |
| 583.6 | | | | | | | | | | coding | |
| ENST00000219 | 16 | 57256097 | 57284687 | − | PLLP-201 | PLLP | 1512 | 1.698795874 | 4.23E−06 | protein- | hg38 |
| 207.9 | | | | | | | | | | coding | |
| ENST00000443 | 1 | 193018622 | 193029309 | − | UCHL5- | UCHL5 | 785 | 1.692233256 | 0.03335 | protein- | hg38 |
| 327.5 | | | | | 211 | | | | | coding | |
| ENST00000415 | 13 | 21378701 | 21459369 | − | ZDHHC20- | ZDHHC20 | 1296 | 1.669976949 | 0.026944 | protein- | hg38 |
| 724.2 | | | | | 204 | | | | | coding | |
| ENST00000228 | 12 | 112938352 | 112973249 | + | OAS3-201 | OAS3 | 6719 | 1.660466063 | 5.1E−09 | protein- | hg38 |
| 928.11 | | | | | | | | | | coding | |
| ENST00000620 | 12 | 121020292 | 121039242 | − | OASL-204 | OASL | 1695 | 1.658981771 | 0.024008 | protein- | hg38 |
| 239.4 | | | | | | | | | | coding | |
| ENST00000438 | 6 | 125919224 | 125931111 | + | NCOA7- | NCOA7 | 3133 | 1.658474127 | 4.92E−07 | protein- | hg38 |
| 495.6 | | | | | 208 | | | | | coding | |
| ENST00000425 | 7 | 44219213 | 44225913 | − | CAMK2B- | CAMK2B | 867 | 1.657370738 | 0.000399 | protein- | hg38 |
| 809.5 | | | | | 213 | | | | | coding | |
| ENST00000370 | 1 | 97077743 | 97921023 | − | DPYD-202 | DPYD | 4412 | 1.65599767 | 5.94E−08 | protein- | hg38 |
| 192.7 | | | | | | | | | | coding | |
| ENST00000371 | 10 | 88822132 | 88851818 | − | ANKRD22- | ANKRD22 | 1596 | 1.652980745 | 0.000514 | protein- | hg38 |
| 930.4 | | | | | 201 | | | | | coding | |
| ENST00000494 | 17 | 19737984 | 19748393 | − | ALDH3A1- | ALDH3A1 | 1572 | 1.647970653 | 0.032054 | protein- | hg38 |
| 157.6 | | | | | 212 | | | | | coding | |
| ENST00000418 | 1 | 6440378 | 6445757 | + | ESPN-203 | ESPN | 641 | 1.647628063 | 0.005929 | protein- | hg38 |
| 286.1 | | | | | | | | | | coding | |
| ENST00000648 | 4 | 147480932 | 147544954 | + | EDNRA- | EDNRA | 4135 | 1.638680328 | 2.14E−07 | protein- | hg38 |
| 866.1 | | | | | 208 | | | | | coding | |
| ENST00000344 | 1 | 154405223 | 154466877 | + | IL6R-201 | IL6R | 3217 | 1.633523891 | 0.014262 | protein- | hg38 |
| 086.8 | | | | | | | | | | coding | |
| ENST00000301 | 8 | 142680456 | 142682724 | + | PSCA-201 | PSCA | 1020 | 1.629896176 | 0.000235 | protein- | hg38 |
| 258.4 | | | | | | | | | | coding | |
| ENST00000340 | 7 | 73830863 | 73832693 | − | CLDN4- | CLDN4 | 1831 | 1.629281425 | 1.76E−07 | protein- | hg38 |
| 958.3 | | | | | 201 | | | | | coding | |
| ENST00000261 | 16 | 88643283 | 88651152 | − | CYBA-201 | CYBA | 797 | 1.618187233 | 8.71E−07 | protein- | hg38 |
| 623.7 | | | | | | | | | | coding | |
| ENST00000523 | 1 | 230839621 | 230856036 | − | C1orf198- | C1orf198 | 1041 | 1.617321869 | 0.017922 | protein- | hg38 |
| 410.1 | | | | | 207 | | | | | coding | |
| ENST00000443 | 1 | 112917516 | 112935988 | − | SLC16A1- | SLC16A1 | 1099 | 1.609534212 | 0.000596 | protein- | hg38 |
| 580.5 | | | | | 203 | | | | | coding | |
| ENST00000360 | 10 | 78033863 | 78040697 | + | RPS24-201 | RPS24 | 537 | 1.601511841 | 2.8E−05 | protein- | hg38 |
| 830.9 | | | | | | | | | | coding | |
| ENST00000374 | X | 64185117 | 64205708 | − | AMER1- | AMER1 | 8407 | 1.593936624 | 0.017395 | protein- | hg38 |
| 869.8 | | | | | 202 | | | | | coding | |
| ENST00000614 | 7 | 114922417 | 115015935 | + | MDFIC-208 | MDFIC | 1068 | 1.59251307 | 0.021045 | protein- | hg38 |
| 186.5 | | | | | | | | | | coding | |
| ENST00000379 | 7 | 93099516 | 93118023 | − | SAMD9- | SAMD9 | 6852 | 1.589856365 | 1.21E−05 | protein- | hg38 |
| 958.2 | | | | | 201 | | | | | coding | |
| ENST00000594 | 19 | 39445593 | 39457740 | + | SUPT5H- | SUPT5H | 364 | 1.588717114 | 0.022985 | protein- | hg38 |
| 729.5 | | | | | 206 | | | | | coding | |
| ENST00000310 | 1 | 115642629 | 115691854 | + | VANGL1- | VANGL1 | 2265 | 1.572827396 | 0.031919 | protein- | hg38 |
| 260.7 | | | | | 201 | | | | | coding | |
| ENST00000469 | 1 | 224227369 | 224330138 | − | NVL-211 | NVL | 2566 | 1.572530083 | 0.018755 | protein- | hg38 |
| 075.5 | | | | | | | | | | coding | |
| ENST00000512 | 4 | 182144690 | 182346929 | + | TENM3- | TENM3 | 651 | 1.572391594 | 0.009256 | protein- | hg38 |
| 480.5 | | | | | 205 | | | | | coding | |
| ENST00000326 | 5 | 149141483 | 149260542 | + | ABLIM3- | ABLIM3 | 4164 | 1.563527883 | 9E−08 | protein- | hg38 |
| 685.11 | | | | | 202 | | | | | coding | |
| ENST00000464 | 6 | 41067146 | 41072534 | − | OARD1- | OARDI | 717 | 1.547002918 | 0.005024 | protein- | hg38 |
| 633.5 | | | | | 204 | | | | | coding | |
| ENST00000271 | 1 | 151511397 | 151538692 | + | CGN-201 | CGN | 5091 | 1.542030925 | 1.09E−07 | protein- | hg38 |
| 636.11 | | | | | | | | | | coding | |
| ENST00000559 | 15 | 88638953 | 88655511 | + | ISG20-208 | ISG20 | 614 | 1.526307851 | 0.00047 | protein- | hg38 |
| 876.1 | | | | | | | | | | coding | |
| ENST00000504 | 5 | 149141821 | 149260439 | + | ABLIM3- | ABLIM3 | 2774 | 1.518185294 | 7.48E−06 | protein- | hg38 |
| 238.5 | | | | | 205 | | | | | coding | |
| ENST00000374 | 6 | 32854161 | 32859585 | + | PSMB9-207 | PSMB9 | 782 | 1.51627083 | 0.001641 | protein- | hg38 |
| 859.2 | | | | | | | | | | coding | |
| ENST00000273 | 3 | 99638596 | 99796733 | + | COL8A1- | COL8A1 | 3029 | 1.515424377 | 0.001368 | protein- | hg38 |
| 342.8 | | | | | 202 | | | | | coding | |
| ENST00000415 | 6 | 41934956 | 42048894 | − | CCND3- | CCND3 | 1843 | 1.515421084 | 0.000802 | protein- | hg38 |
| 497.6 | | | | | 205 | | | | | coding | |
| ENST00000498 | 9 | 21968105 | 21995301 | − | CDKN2A- | CDKN2A | 926 | 1.511139218 | 0.003044 | protein- | hg38 |
| 628.6 | | | | | 209 | | | | | coding | |
| ENST00000648 | 8 | 47960898 | 47977016 | + | MCM4-217 | MCM4 | 2598 | 1.502554904 | 0.043114 | protein- | hg38 |
| 407.1 | | | | | | | | | | coding | |
| ENST00000553 | 12 | 112916617 | 112919210 | + | OAS1-210 | OAS1 | 890 | 1.499731073 | 0.002831 | protein- | hg38 |
| 152.1 | | | | | | | | | | coding | |
| ENST00000591 | 12 | 53542887 | 53626410 | − | ATF7-212 | ATF7 | 860 | 1.483036353 | 0.04324 | protein- | hg38 |
| 397.1 | | | | | | | | | | coding | |
| ENST00000393 | 14 | 94612384 | 94624055 | + | SERPINA3- | SERPINA3 | 1581 | 1.480391181 | 0.023728 | protein- | hg38 |
| 080.8 | | | | | 202 | | | | | coding | |
| ENST00000372 | 10 | 86958656 | 86963260 | + | SNCG-202 | SNCG | 701 | 1.475187319 | 2.67E−05 | protein- | hg38 |
| 017.3 | | | | | | | | | | coding | |
| ENST00000434 | 19 | 281040 | 291504 | − | PLPP2-203 | PLPP2 | 1383 | 1.467331132 | 9.09E−06 | protein- | hg38 |
| 325.6 | | | | | | | | | | coding | |
| ENST00000269 | 17 | 82321024 | 82333998 | − | SECTMI- | SECTM1 | 2235 | 1.465509382 | 1.52E−07 | protein- | hg38 |
| 389.7 | | | | | 201 | | | | | coding | |
| ENST00000252 | 19 | 18386158 | 18389176 | + | GDF15-201 | GDF15 | 1200 | 1.464416629 | 1.55E−07 | protein- | hg38 |
| 809.3 | | | | | | | | | | coding | |
| ENST00000358 | 22 | 24181259 | 24189110 | + | SUSD2-201 | SUSD2 | 3404 | 1.463546418 | 7.01E−07 | protein- | hg38 |
| 321.3 | | | | | | | | | | coding | |
| ENST00000276 | 9 | 19115770 | 19127576 | − | PLIN2-201 | PLIN2 | 1972 | 1.45802159 | 2.93E−07 | protein- | hg38 |
| 914.6 | | | | | | | | | | coding | |
| ENST00000437 | 5 | 96741342 | 96774683 | + | CAST-209 | CAST | 3377 | 1.448825548 | 2.3E−05 | protein- | hg38 |
| 034.6 | | | | | | | | | | coding | |
| ENST00000355 | 6 | 133241357 | 133532119 | + | EYA4-201 | EYA4 | 5692 | 1.441577404 | 0.034804 | protein- | hg38 |
| 167.7 | | | | | | | | | | coding | |
| ENST00000370 | 1 | 75202131 | 75611116 | − | SLC44A5- | SLC44A5 | 3896 | 1.438088146 | 1.39E−07 | protein- | hg38 |
| 859.7 | | | | | 202 | | | | | coding | |
| ENST00000202 | 12 | 112906777 | 112919903 | + | OAS1-201 | OAS1 | 1816 | 1.42445533 | 0.001181 | protein- | hg38 |
| 917.9 | | | | | | | | | | coding | |
| ENST00000485 | 3 | 111071743 | 111135954 | + | NECTIN3- | NECTIN3 | 3664 | 1.413966917 | 5.53E−05 | protein- | hg38 |
| 303.5 | | | | | 206 | | | | | coding | |
| ENST00000606 | 1 | 150487420 | 150507284 | + | TARS2-214 | TARS2 | 2162 | 1.407383787 | 0.043118 | protein- | hg38 |
| 933.5 | | | | | | | | | | coding | |
| ENST00000323 | 2 | 201260500 | 201287709 | + | CASP8-203 | CASP8 | 2650 | 1.406496761 | 0.002499 | protein- | hg38 |
| 492.11 | | | | | | | | | | coding | |
| ENST00000423 | 19 | 45407334 | 45478828 | − | ERCC1-204 | ERCC1 | 3119 | 1.389032771 | 0.018079 | protein- | hg38 |
| 698.6 | | | | | | | | | | coding | |
| ENST00000287 | 11 | 57551662 | 57567807 | − | UBE2L6- | UBE2L6 | 1354 | 1.38472936 | 5.15E−05 | protein- | hg38 |
| 156.8 | | | | | 201 | | | | | coding | |
| ENST00000448 | 3 | 146515955 | 146544620 | − | PLSCR1- | PLSCR1 | 996 | 1.380290587 | 1.39E−05 | protein- | hg38 |
| 787.6 | | | | | 202 | | | | | coding | |
| ENST00000511 | 5 | 80628124 | 80654552 | − | DHFR-205 | DHFR | 1474 | 1.363387586 | 0.038267 | protein- | hg38 |
| 032.5 | | | | | | | | | | coding | |
| ENST00000342 | 11 | 64823387 | 64844569 | − | CDC42BPG- | CDC42BPG | 5742 | 1.361107963 | 9.98E−08 | protein- | hg38 |
| 711.5 | | | | | 201 | | | | | coding | |
| ENST00000438 | 17 | 43006740 | 43014456 | + | IFI35-204 | IFI35 | 1232 | 1.354485215 | 0.017385 | protein- | hg38 |
| 323.2 | | | | | | | | | | coding | |
| ENST00000370 | 1 | 86424086 | 86456558 | + | CLCA2-201 | CLCA2 | 4025 | 1.349992624 | 8.14E−07 | protein- | hg38 |
| 565.4 | | | | | | | | | | coding | |
| ENST00000471 | 7 | 139060338 | 139109719 | − | ZC3HAV1- | ZC3HAV1 | 3182 | 1.343526307 | 1.14E−05 | protein- | hg38 |
| 652.1 | | | | | 204 | | | | | coding | |
| ENST00000222 | 7 | 2519842 | 2528429 | + | LFNG-201 | LFNG | 2377 | 1.336747581 | 0.000258 | protein- | hg38 |
| 725.9 | | | | | | | | | | coding | |
| ENST00000591 | 19 | 45409619 | 45423501 | − | ERCC1-212 | ERCC1 | 836 | 1.33584231 | 0.024657 | protein- | hg38 |
| 636.5 | | | | | | | | | | coding | |
| ENST00000551 | 12 | 98593650 | 98601707 | + | SLC25A3- | SLC25A3 | 1359 | 1.335564474 | 0.024824 | protein- | hg38 |
| 917.5 | | | | | 216 | | | | | coding | |
| ENST00000496 | 11 | 3808594 | 3826330 | + | PGAP2-227 | PGAP2 | 1530 | 1.332402007 | 0.02567 | protein- | hg38 |
| 834.6 | | | | | | | | | | coding | |
| ENST00000339 | 2 | 187478585 | 187554438 | − | TFPI-202 | TFPI | 1088 | 1.33234038 | 0.010318 | protein- | hg38 |
| 091.8 | | | | | | | | | | coding | |
| ENST00000360 | 3 | 146069444 | 146161167 | − | PLOD2-202 | PLOD2 | 3665 | 1.326148178 | 5.56E−06 | protein- | hg38 |
| 060.7 | | | | | | | | | | coding | |
| ENST00000562 | 15 | 72209751 | 72222531 | − | PKM-207 | PKM | 582 | 1.325764124 | 0.020252 | protein- | hg38 |
| 997.5 | | | | | | | | | | coding | |
| ENST00000438 | 1 | 78649832 | 78659428 | + | IFI44-202 | IFI44 | 686 | 1.324565046 | 0.010525 | protein- | hg38 |
| 486.1 | | | | | | | | | | coding | |
| ENST00000647 | 12 | 56714612 | 56741535 | − | AC117378.1- | AC117378.1 | 588 | 1.321838867 | 0.047677 | protein- | hg38 |
| 707.1 | | | | | 201 | | | | | coding | |
| ENST00000579 | 9 | 21967753 | 21994624 | − | CDKN2A- | CDKN2A | 1283 | 1.321645272 | 0.000834 | protein- | hg38 |
| 755.1 | | | | | 214 | | | | | coding | |
| ENST00000615 | 1 | 239632206 | 239909415 | + | CHRM3- | CHRM3 | 2294 | 1.320580373 | 8.26E−05 | protein- | hg38 |
| 928.4 | | | | | 207 | | | | | coding | |
| ENST00000373 | 1 | 29236516 | 29326800 | + | PTPRU-202 | PTPRU | 5579 | 1.319349123 | 1.15E−06 | protein- | hg38 |
| 779.7 | | | | | | | | | | coding | |
| ENST00000420 | 1 | 75724780 | 75762809 | + | ACADM- | ACADM | 1332 | 1.317979264 | 0.000638 | protein- | hg38 |
| 607.6 | | | | | 203 | | | | | coding | |
| ENST00000371 | 10 | 88879734 | 88923487 | + | STAMBPL1- | STAMBPL1 | 2532 | 1.313560467 | 2.74E−06 | protein- | hg38 |
| 926.7 | | | | | 203 | | | | | coding | |
| ENST00000553 | 16 | 14750813 | 14765413 | + | NPIPA2- | NPIPA2 | 1053 | 1.310591989 | 0.003994 | protein- | hg38 |
| 201.1 | | | | | 203 | | | | | coding | |
| ENST00000378 | X | 30653359 | 30730608 | + | GK-203 | GK | 3707 | 1.309416479 | 2.01E−05 | protein- | hg38 |
| 943.7 | | | | | | | | | | coding | |
| ENST00000591 | 17 | 44345302 | 44350283 | + | GRN-218 | GRN | 585 | 1.306794267 | 0.041062 | protein- | hg38 |
| 740.5 | | | | | | | | | | coding | |
| ENST00000333 | 22 | 38982409 | 38992784 | + | APOBEC3B- | APOBEC3B | 1533 | 1.3040769 | 9.46E−05 | protein- | hg38 |
| 467.3 | | | | | 201 | | | | | coding | |
| ENST00000262 | X | 85277396 | 85379743 | − | POF1B-201 | POF1B | 3941 | 1.302427429 | 1.7E−06 | protein- | hg38 |
| 753.8 | | | | | | | | | | coding | |
| ENST00000646 | 1 | 99708632 | 99766630 | − | FRRS1-205 | FRRS1 | 2304 | 1.300571247 | 3.16E−06 | protein- | hg38 |
| 001.1 | | | | | | | | | | coding | |
| ENST00000507 | 6 | 99464636 | 99503773 | − | USP45-210 | USP45 | 715 | 1.299531643 | 0.014179 | protein- | hg38 |
| 717.5 | | | | | | | | | | coding | |
| ENST00000360 | 20 | 1309975 | 1329239 | − | SDCBP2- | SDCBP2 | 1519 | 1.297179778 | 0.000382 | protein- | hg38 |
| 779.3 | | | | | 202 | | | | | coding | |
| ENST00000371 | 10 | 89205629 | 89207314 | − | CH25H-201 | CH25H | 1686 | 1.296271652 | 0.001245 | protein- | hg38 |
| 852.3 | | | | | | | | | | coding | |
| ENST00000343 | 16 | 23302270 | 23381299 | + | SCNNIB- | SCNN1B | 2597 | 1.290633396 | 0.003293 | protein- | hg38 |
| 070.6 | | | | | 202 | | | | | coding | |
| ENST00000245 | 19 | 6677704 | 6720682 | − | C3-201 | C3 | 5263 | 1.282167524 | 1.71E−08 | protein- | hg38 |
| 907.10 | | | | | | | | | | coding | |
| ENST00000263 | 11 | 102317495 | 102337734 | + | BIRC3-201 | BIRC3 | 5197 | 1.279393292 | 3.07E−06 | protein- | hg38 |
| 464.7 | | | | | | | | | | coding | |
| ENST00000335 | 11 | 65787022 | 65797219 | + | OVOL1- | OVOL1 | 3034 | 1.279364688 | 1.83E−06 | protein- | hg38 |
| 987.7 | | | | | 201 | | | | | coding | |
| ENST00000412 | 6 | 31353872 | 31357187 | − | HLA-B-249 | HLA-B | 1547 | 1.276259013 | 2.28E−08 | protein- | hg38 |
| 585.6 | | | | | | | | | | coding | |
| ENST00000338 | 2 | 237487251 | 237553994 | + | MLPH-202 | MLPH | 2332 | 1.276096482 | 0.025254 | protein- | hg38 |
| 530.8 | | | | | | | | | | coding | |
| ENST00000276 | 9 | 22002903 | 22009363 | − | CDKN2B- | CDKN2B | 3911 | 1.272444725 | 2.82E−08 | protein- | hg38 |
| 925.6 | | | | | 201 | | | | | coding | |
| ENST00000444 | X | 153786801 | 153794359 | − | IDH3G-206 | IDH3G | 888 | 1.271104595 | 0.028463 | protein- | hg38 |
| 450.5 | | | | | | | | | | coding | |
| ENST00000555 | 14 | 75278977 | 75280789 | + | FOS-205 | FOS | 629 | 1.26536441 | 0.015278 | protein- | hg38 |
| 242.1 | | | | | | | | | | coding | |
| ENST00000368 | 1 | 156699606 | 156705601 | − | CRABP2- | CRABP2 | 992 | 1.265023982 | 0.000735 | protein- | hg38 |
| 222.7 | | | | | 203 | | | | | coding | |
| ENST00000312 | 11 | 66011841 | 66013505 | − | CST6-201 | CST6 | 759 | 1.263773971 | 0.000842 | protein- | hg38 |
| 134.2 | | | | | | | | | | coding | |
| ENST00000325 | 4 | 41935152 | 41960041 | − | TMEM33- | TMEM33 | 6221 | 1.259795926 | 0.025456 | protein- | hg38 |
| 094.9 | | | | | 202 | | | | | coding | |
| ENST00000265 | 9 | 119166630 | 119369467 | − | BRINP1- | BRINP1 | 3202 | 1.258704104 | 9.42E−07 | protein- | hg38 |
| 922.7 | | | | | 201 | | | | | coding | |
| ENST00000301 | 19 | 8364151 | 8374373 | + | ANGPTL4- | ANGPTL4 | 1879 | 1.255791714 | 0.010142 | protein- | hg38 |
| 455.6 | | | | | 201 | | | | | coding | |
| ENST00000452 | 12 | 112906850 | 112918462 | + | OAS1-203 | OAS1 | 1990 | 1.248296033 | 0.001156 | protein- | hg38 |
| 357.6 | | | | | | | | | | coding | |
| ENST00000237 | 5 | 95813849 | 95823005 | − | GLRX-201 | GLRX | 1211 | 1.245230124 | 1.45E−05 | protein- | hg38 |
| 858.10 | | | | | | | | | | coding | |
| ENST00000262 | 22 | 45502883 | 45563362 | + | FBLN1-201 | FBLN1 | 2251 | 1.244787621 | 6.46E−06 | protein- | hg38 |
| 722.11 | | | | | | | | | | coding | |
| ENST00000560 | 15 | 84669544 | 84716111 | − | SEC11A- | SEC11A | 1089 | 1.240747324 | 0.000145 | protein- | hg38 |
| 266.5 | | | | | 209 | | | | | coding | |
| ENST00000392 | 2 | 190975537 | 191014168 | − | STAT1-202 | STAT1 | 2716 | 1.238694659 | 0.000586 | protein- | hg38 |
| 322.7 | | | | | | | | | | coding | |
| ENST00000563 | 16 | 30064274 | 30070414 | + | ALDOA- | ALDOA | 1550 | 1.238121527 | 9.35E−05 | protein- | hg38 |
| 060.6 | | | | | 206 | | | | | coding | |
| ENST00000261 | 3 | 99638475 | 99799226 | + | COL8A1- | COL8A1 | 5705 | 1.23513888 | 5.39E−05 | protein- | hg38 |
| 037.7 | | | | | 201 | | | | | coding | |
| ENST00000380 | 9 | 22005987 | 22009272 | − | CDKN2B- | CDKN2B | 859 | 1.230678296 | 0.000241 | protein- | hg38 |
| 142.4 | | | | | 202 | | | | | coding | |
| ENST00000327 | 22 | 45502891 | 45601135 | + | FBLN1-202 | FBLN1 | 2896 | 1.229023581 | 1.72E−06 | protein- | hg38 |
| 858.10 | | | | | | | | | | coding | |
| ENST00000453 | 2 | 187496884 | 187554492 | − | TFPI-210 | TFPI | 733 | 1.226250225 | 0.007553 | protein- | hg38 |
| 013.5 | | | | | | | | | | coding | |
| ENST00000361 | 14 | 69879416 | 70030727 | + | SMOC1- | SMOC1 | 2040 | 1.224751421 | 1.67E−06 | protein- | hg38 |
| 956.7 | | | | | 201 | | | | | coding | |
| ENST00000381 | 11 | 1838989 | 1841678 | + | TNNI2-204 | TNNI2 | 743 | 1.219014418 | 0.004078 | protein- | hg38 |
| 911.5 | | | | | | | | | | coding | |
| ENST00000261 | 1 | 114717295 | 114757974 | − | CSDE1-201 | CSDE1 | 3228 | 1.212502489 | 0.000214 | protein- | hg38 |
| 443.9 | | | | | | | | | | coding | |
| ENST00000358 | 11 | 47468284 | 47489014 | − | CELF1-202 | CELF1 | 2108 | 1.20923745 | 0.043583 | protein- | hg38 |
| 597.7 | | | | | | | | | | coding | |
| ENST00000381 | 14 | 69879426 | 70032366 | + | SMOC1- | SMOC1 | 3666 | 1.204365528 | 3.49E−06 | protein- | hg38 |
| 280.4 | | | | | 202 | | | | | coding | |
| ENST00000252 | 2 | 1631887 | 1744506 | − | PXDN-201 | PXDN | 6808 | 1.202957804 | 1.01E−08 | protein- | hg38 |
| 804.8 | | | | | | | | | | coding | |
| ENST00000359 | 1 | 110004131 | 110022389 | + | AHCYL1- | AHCYL1 | 2503 | 1.200589992 | 0.00205 | protein- | hg38 |
| 172.3 | | | | | 201 | | | | | coding | |
| ENST00000638 | 1 | 99970024 | 100015697 | + | SLC35A3- | SLC35A3 | 1286 | 1.198206287 | 0.008926 | protein- | hg38 |
| 988.1 | | | | | 213 | | | | | coding | |
| ENST00000404 | 7 | 12687635 | 12688914 | + | ARL4A- | ARL4A | 840 | 1.186301266 | 0.001906 | protein- | hg38 |
| 894.1 | | | | | 205 | | | | | coding | |
| ENST00000268 | 17 | 73232637 | 73248874 | + | C17orf80- | C17orf80 | 3449 | 1.184459936 | 0.04443 | protein- | hg38 |
| 942.12 | | | | | 202 | | | | | coding | |
| ENST00000308 | 1 | 204198160 | 204214092 | − | GOLT1A- | GOLT1A | 883 | 1.179869656 | 0.009353 | protein- | hg38 |
| 302.3 | | | | | 201 | | | | | coding | |
| ENST00000370 | 1 | 88935773 | 88992776 | − | KYAT3- | KYAT3 | 1868 | 1.178914559 | 1.72E−05 | protein- | hg38 |
| 491.7 | | | | | 203 | | | | | coding | |
| ENST00000267 | 14 | 24239643 | 24242674 | − | TINF2-201 | TINF2 | 1852 | 1.174885412 | 0.046248 | protein- | hg38 |
| 415.11 | | | | | | | | | | coding | |
| ENST00000378 | X | 30653478 | 30729170 | + | GK-204 | GK | 2063 | 1.161979694 | 0.000379 | protein- | hg38 |
| 945.7 | | | | | | | | | | coding | |
| ENST00000306 | 4 | 76033682 | 76036197 | − | CXCL11- | CXCL11 | 1606 | 1.159735131 | 0.001149 | protein- | hg38 |
| 621.7 | | | | | 201 | | | | | coding | |
| ENST00000340 | 19 | 43648580 | 43670350 | − | PLAUR- | PLAUR | 1548 | 1.158213455 | 5.48E−07 | protein- | hg38 |
| 093.7 | | | | | 203 | | | | | coding | |
| ENST00000358 | X | 81113701 | 81201942 | − | HMGN5- | HMGN5 | 2126 | 1.150438455 | 0.009353 | protein- | hg38 |
| 130.6 | | | | | 201 | | | | | coding | |
| ENST00000607 | 1 | 152804835 | 152805478 | − | LCE1C-202 | LCE1C | 644 | 1.148019512 | 0.032191 | protein- | hg38 |
| 093.1 | | | | | | | | | | coding | |
| ENST00000471 | 3 | 122528005 | 122564242 | − | PARP9-204 | PARP9 | 3040 | 1.147220938 | 0.002751 | protein- | hg38 |
| 785.5 | | | | | | | | | | coding | |
| ENST00000345 | 8 | 66793614 | 66862022 | + | SGK3-201 | SGK3 | 4055 | 1.147047433 | 0.046262 | protein- | hg38 |
| 714.8 | | | | | | | | | | coding | |
| ENST00000422 | 17 | 40019503 | 40023160 | − | MED24- | MED24 | 905 | 1.143191754 | 0.003406 | protein- | hg38 |
| 942.6 | | | | | 205 | | | | | coding | |
| ENST00000370 | 1 | 167541013 | 167553767 | − | CREG1-201 | CREG1 | 1974 | 1.141436248 | 1.58E−05 | protein- | hg38 |
| 509.4 | | | | | | | | | | coding | |
| ENST00000646 | 4 | 153684070 | 153703646 | + | TLR2-209 | TLR2 | 1177 | 1.136662666 | 0.01496 | protein- | hg38 |
| 900.1 | | | | | | | | | | coding | |
| ENST00000244 | 6 | 56056590 | 56247746 | − | COL21A1- | COL21A1 | 4339 | 1.124118493 | 0.012067 | protein- | hg38 |
| 728.9 | | | | | 201 | | | | | coding | |
| ENST00000437 | 5 | 132485667 | 132490777 | − | IRF1-203 | IRF1 | 832 | 1.122842161 | 0.000482 | protein- | hg38 |
| 654.5 | | | | | | | | | | coding | |
| ENST00000591 | 17 | 78971238 | 78979918 | − | LGALS3BP- | LGALS3BP | 1961 | 1.118288168 | 0.03995 | protein- | hg38 |
| 778.5 | | | | | 218 | | | | | coding | |
| ENST00000305 | 3 | 149369022 | 149377865 | − | TM4SF1- | TM4SF1 | 1771 | 1.11727016 | 1.83E−05 | protein- | hg38 |
| 366.7 | | | | | 201 | | | | | coding | |
| ENST00000251 | 17 | 42101404 | 42112733 | − | DHX58-201 | DHX58 | 2617 | 1.116404153 | 0.009189 | protein- | hg38 |
| 642.7 | | | | | | | | | | coding | |
| ENST00000371 | 1 | 58575423 | 58577773 | − | TACSTD2- | TACSTD2 | 2351 | 1.115708016 | 7.42E−07 | protein- | hg38 |
| 225.3 | | | | | 201 | | | | | coding | |
| ENST00000288 | 14 | 24290598 | 24299833 | − | DHRS1-201 | DHRS1 | 1480 | 1.107297824 | 1.48E−05 | protein- | hg38 |
| 111.11 | | | | | | | | | | coding | |
| ENST00000306 | 15 | 88638743 | 88656483 | + | ISG20-201 | ISG20 | 1856 | 1.105778034 | 7.83E−05 | protein- | hg38 |
| 072.9 | | | | | | | | | | coding | |
| ENST00000260 | 15 | 56428731 | 56465137 | − | MNS1-201 | MNS1 | 2023 | 1.105147615 | 1.45E−05 | protein- | hg38 |
| 453.3 | | | | | | | | | | coding | |
| ENST00000530 | 9 | 21968001 | 21994411 | − | CDKN2A- | CDKN2A | 748 | 1.104877994 | 8.31E−05 | protein- | hg38 |
| 628.2 | | | | | 210 | | | | | coding | |
| ENST00000306 | 1 | 98661723 | 98760500 | + | SNX7-201 | SNX7 | 1734 | 1.103171223 | 3.22E−06 | protein- | hg38 |
| 121.7 | | | | | | | | | | coding | |
| ENST00000555 | 12 | 57230354 | 57231913 | + | SHMT2- | SHMT2 | 600 | 1.099055502 | 0.009523 | protein- | hg38 |
| 773.5 | | | | | 221 | | | | | coding | |
| ENST00000525 | 11 | 44933036 | 44950874 | − | TP53111- | TP53I11 | 2647 | 1.097814404 | 0.048493 | protein- | hg38 |
| 680.5 | | | | | 208 | | | | | coding | |
| ENST00000637 | 15 | 51056604 | 51094705 | − | TNFAIP8L3- | TNFAIP8L3 | 2002 | 1.096883624 | 0.001904 | protein- | hg38 |
| 513.1 | | | | | 202 | | | | | coding | |
| ENST00000377 | 1 | 7919847 | 7940866 | − | TNFRSF9- | TNFRSF9 | 1923 | 1.092434453 | 0.000272 | protein- | hg38 |
| 507.7 | | | | | 201 | | | | | coding | |
| ENST00000421 | X | 107153292 | 107206433 | | NUP62CL- | NUP62CL | 618 | 1.091444621 | 0.017065 | protein- | hg38 |
| 752.1 | | | | | 202 | | | | | coding | |
| ENST00000398 | 11 | 67583595 | 67586656 | + | GSTP1-202 | GSTP1 | 961 | 1.088616726 | 0.000386 | protein- | hg38 |
| 606.8 | | | | | | | | | | coding | |
| ENST00000565 | X | 136873978 | 136880764 | − | RBMX-209 | RBMX | 1292 | 1.086826055 | 0.001733 | protein- | hg38 |
| 438.1 | | | | | | | | | | coding | |
| ENST00000474 | 3 | 122680618 | 122730840 | + | PARP14- | PARP14 | 7915 | 1.086260872 | 1.01E−06 | protein- | hg38 |
| 629.6 | | | | | 202 | | | | | coding | |
| ENST00000376 | 9 | 82979585 | 83063128 | − | RASEF-202 | RASEF | 5576 | 1.084944545 | 6.62E−07 | protein- | hg38 |
| 447.3 | | | | | | | | | | coding | |
| ENST00000433 | 1 | 111619777 | 111704405 | + | RAP1A-203 | RAP1A | 666 | 1.080799519 | 0.001482 | protein- | hg38 |
| 097.5 | | | | | | | | | | coding | |
| ENST00000592 | 17 | 78378670 | 78403679 | − | PGS1-215 | PGS1 | 988 | 1.079873937 | 0.048509 | protein- | hg38 |
| 043.5 | | | | | | | | | | coding | |
| ENST00000357 | 1 | 112674745 | 112700710 | − | MOV10- | MOV10 | 3383 | 1.079809777 | 3.51E−05 | protein- | hg38 |
| 443.2 | | | | | 201 | | | | | coding | |
| ENST00000379 | 16 | 69709401 | 69726668 | − | NQO1-203 | NQO1 | 2527 | 1.079527383 | 0.000151 | protein- | hg38 |
| 047.7 | | | | | | | | | | coding | |
| ENST00000267 | 12 | 121777754 | 121794262 | − | RHOF-201 | RHOF | 3009 | 1.076945194 | 9E−07 | protein- | hg38 |
| 205.6 | | | | | | | | | | coding | |
| ENST00000405 | 5 | 132483086 | 132490262 | − | IRF1-202 | IRF1 | 2061 | 1.074349622 | 7.61E−06 | protein- | hg38 |
| 885.6 | | | | | | | | | | coding | |
| ENST00000310 | 4 | 114598455 | 114678224 | + | UGT8-201 | UGT8 | 4084 | 1.072205509 | 0.000112 | protein- | hg38 |
| 836.10 | | | | | | | | | | coding | |
| ENST00000370 | 1 | 84498329 | 84506565 | − | GNG5-201 | GNG5 | 920 | 1.069911739 | 0.004097 | protein- | hg38 |
| 641.3 | | | | | | | | | | coding | |
| ENST00000392 | 6 | 122610232 | 122726372 | + | PKIB-206 | PKIB | 1811 | 1.069629832 | 0.02107 | protein- | hg38 |
| 490.5 | | | | | | | | | | coding | |
| ENST00000318 | 11 | 26994184 | 26996121 | + | FIBIN-201 | FIBIN | 1938 | 1.066399894 | 0.000432 | protein- | hg38 |
| 627.3 | | | | | | | | | | coding | |
| ENST00000371 | 1 | 56645322 | 56715335 | + | PRKAA2- | PRKAA2 | 9347 | 1.065173779 | 0.009315 | protein- | hg38 |
| 244.8 | | | | | 201 | | | | | coding | |
| ENST00000352 | 11 | 64318182 | 64321740 | + | PRDX5-203 | PRDX5 | 596 | 1.064284882 | 0.00028 | protein- | hg38 |
| 435.8 | | | | | | | | | | coding | |
| ENST00000255 | 11 | 63998558 | 64166061 | − | MACROD1- | MACROD1 | 1205 | 1.064039026 | 1.99E−05 | protein- | hg38 |
| 681.6 | | | | | 201 | | | | | coding | |
| ENST00000467 | 20 | 63559202 | 63572455 | − | HELZ2-204 | HELZ2 | 8064 | 1.060676814 | 1.44E−06 | protein- | hg38 |
| 148.1 | | | | | | | | | | coding | |
| ENST00000589 | 19 | 5842891 | 5851474 | − | FUT3-207 | FUT3 | 2239 | 1.057696804 | 0.0007 | protein- | hg38 |
| 620.5 | | | | | | | | | | coding | |
| ENST00000369 | 20 | 63974113 | 63979642 | − | SAMD10- | SAMD10 | 2181 | 1.05730068 | 7.39E−05 | protein- | hg38 |
| 886.7 | | | | | 201 | | | | | coding | |
| ENST00000409 | 2 | 197453493 | 197474168 | − | COQ10B- | COQ10B | 879 | 1.055791847 | 0.047926 | protein- | hg38 |
| 398.5 | | | | | 203 | | | | | coding | |
| ENST00000354 | 11 | 494552 | 507221 | − | RNH1-201 | RNH1 | 1894 | 1.055540263 | 0.001294 | protein- | hg38 |
| 420.6 | | | | | | | | | | coding | |
| ENST00000376 | 6 | 29942245 | 29945884 | − | HLA-A-202 | HLA-A | 1854 | 1.054755771 | 1.08E−05 | protein- | hg38 |
| 806.9 | | | | | | | | | | coding | |
| ENST00000206 | 6 | 153010722 | 153131249 | − | RGS17-201 | RGS17 | 1636 | 1.050812352 | 0.001916 | protein- | hg38 |
| 262.1 | | | | | | | | | | coding | |
| ENST00000550 | 12 | 112907052 | 112916816 | + | OAS1-206 | OAS1 | 950 | 1.045057082 | 0.016027 | protein- | hg38 |
| 689.1 | | | | | | | | | | coding | |
| ENST00000607 | 15 | 36895149 | 37095021 | − | MEIS2-227 | MEIS2 | 705 | 1.044547999 | 0.033916 | protein- | hg38 |
| 277.5 | | | | | | | | | | coding | |
| ENST00000271 | 1 | 150549369 | 150560932 | + | ADAMTSL4- | ADAMTSL4 | 4250 | 1.044039475 | 3.6E−05 | protein- | hg38 |
| 643.8 | | | | | 201 | | | | | coding | |
| ENST00000370 | 1 | 77695987 | 77759852 | − | USP33-204 | USP33 | 4327 | 1.041177296 | 0.000181 | protein- | hg38 |
| 794.7 | | | | | | | | | | coding | |
| ENST00000264 | 19 | 10270835 | 10286615 | + | ICAM1-201 | ICAM1 | 3252 | 1.040535278 | 7.64E−05 | protein- | hg38 |
| 832.7 | | | | | | | | | | coding | |
| ENST00000319 | 7 | 29563811 | 29567295 | + | PRR15-201 | PRR15 | 1678 | 1.035061933 | 2.22E−06 | protein- | hg38 |
| 694.2 | | | | | | | | | | coding | |
| ENST00000359 | 5 | 107859035 | 108381410 | − | FBXL17- | FBXL17 | 4510 | 1.032579004 | 0.000155 | protein- | hg38 |
| 660.9 | | | | | 201 | | | | | coding | |
| ENST00000255 | 11 | 63552770 | 63563383 | − | HRASLS2- | HRASLS2 | 742 | 1.032565689 | 0.008265 | protein- | hg38 |
| 695.1 | | | | | 201 | | | | | coding | |
| ENST00000372 | X | 103309346 | 103311046 | − | BEX2-202 | BEX2 | 899 | 1.03209662 | 8.21E−07 | protein- | hg38 |
| 677.7 | | | | | | | | | | coding | |
| ENST00000358 | 16 | 67934502 | 67937087 | − | PSMB10- | PSMB10 | 1218 | 1.02728135 | 0.001303 | protein- | hg38 |
| 514.8 | | | | | 201 | | | | | coding | |
| ENST00000360 | 16 | 29459889 | 29464976 | + | SULTIA4- | SULT1A4 | 1390 | 1.027234521 | 0.03877 | protein- | hg38 |
| 423.11 | | | | | 201 | | | | | coding | |
| ENST00000370 | 1 | 90915298 | 91021473 | − | ZNF644- | ZNF644 | 5702 | 1.024422188 | 0.026572 | protein- | hg38 |
| 440.5 | | | | | 204 | | | | | coding | |
| ENST00000370 | 1 | 100872387 | 100894812 | − | EXTL2-201 | EXTL2 | 2835 | 1.022605206 | 0.000621 | protein- | hg38 |
| 113.7 | | | | | | | | | | coding | |
| ENST00000255 | X | 106726664 | 106796993 | + | RNF128- | RNF128 | 2817 | 1.020463449 | 2.22E−06 | protein- | hg38 |
| 499.2 | | | | | 201 | | | | | coding | |
| ENST00000367 | 1 | 182598623 | 182604408 | − | RGS16-201 | RGS16 | 2427 | 1.018740178 | 2.56E−05 | protein- | hg38 |
| 558.5 | | | | | | | | | | coding | |
| ENST00000352 | 8 | 78516355 | 78603185 | − | PKIA-201 | PKIA | 1736 | 1.017748699 | 0.012685 | protein- | hg38 |
| 966.9 | | | | | | | | | | coding | |
| ENST00000476 | 6 | 167951949 | 167963060 | + | AFDN-212 | AFDN | 867 | 1.016874951 | 0.017701 | protein- | hg38 |
| 946.2 | | | | | | | | | | coding | |
| ENST00000535 | 1 | 86704570 | 86748176 | − | SH3GLB1- | SH3GLB1 | 6227 | 1.014736102 | 0.004191 | protein- | hg38 |
| 010.5 | | | | | 203 | | | | | coding | |
| ENST00000445 | 2 | 119679191 | 119681195 | + | TMEM177- | TMEM177 | 791 | 1.013585088 | 0.045371 | protein- | hg38 |
| 518.1 | | | | | 205 | | | | | coding | |
| ENST00000529 | 8 | 38263130 | 38269140 | − | PLPP5-209 | PLPP5 | 2185 | 1.013525386 | 0.000551 | protein- | hg38 |
| 359.5 | | | | | | | | | | coding | |
| ENST00000368 | 1 | 159009918 | 159055151 | + | IFI16-205 | IFI16 | 2704 | 1.012486902 | 1.69E−05 | protein- | hg38 |
| 132.7 | | | | | | | | | | coding | |
| ENST00000398 | 21 | 43053191 | 43075945 | − | CBS-204 | CBS | 2605 | 1.011467368 | 3.62E−06 | protein- | hg38 |
| 165.7 | | | | | | | | | | coding | |
| ENST00000630 | 1 | 196652045 | 196701566 | + | CFH-206 | CFH | 1658 | 1.011352309 | 0.01858 | protein- | hg38 |
| 130.2 | | | | | | | | | | coding | |
| ENST00000605 | 17 | 35872002 | 35880291 | − | CCL5-203 | CCL5 | 719 | 1.006059812 | 0.007495 | protein- | hg38 |
| 509.1 | | | | | | | | | | coding | |
| ENST00000370 | 1 | 78620403 | 78646145 | − | IFI44L-201 | IFI44L | 5874 | 1.005018412 | 0.000101 | protein- | hg38 |
| 751.9 | | | | | | | | | | coding | |
| ENST00000483 | 1 | 1628489 | 1630589 | + | MIB2-211 | MIB2 | 1058 | 1.001682773 | 0.011238 | protein- | hg38 |
| 015.1 | | | | | | | | | | coding | |

TABLE 3
LncRNA Biomarkers

| | | | | | | | | | p- | | |
|---|---|---|---|---|---|---|---|---|---|---|---|
| enst | chromosome | start.position | end.position | strand | transcript.id | gene | len | log2FoldChange | value | biotype | genome |
| ENST00000514 | 6 | 41937713 | 42048688 | − | CCND3-220 | CCND3 | 476 | 3.788433339 | 0.002192 | lncRNA | hg38 |
| 382.5 | | | | | | | | | | | |
| ENST00000495 | 1 | 78649833 | 78664078 | + | IFI44-209 | IFI44 | 1117 | 2.217078372 | 0.000116 | lncRNA | hg38 |
| 254.5 | | | | | | | | | | | |
| ENST00000545 | 12 | 20855092 | 20861054 | + | SLCO1B3- | SLCO1B3 | 339 | 2.133353419 | 0.002329 | lncRNA | hg38 |
| 880.1 | | | | | 205 | | | | | | |
| ENST00000564 | 16 | 22302974 | 22309945 | + | POLR3E− | POLR3E | 449 | 2.112213083 | 0.020807 | lncRNA | hg38 |
| 256.1 | | | | | 210 | | | | | | |
| ENST00000514 | 16 | 89686728 | 89691512 | + | CDK10-215 | CDK10 | 474 | 2.008520354 | 0.015893 | lncRNA | hg38 |
| 965.5 | | | | | | | | | | | |
| ENST00000506 | 4 | 52626128 | 52656573 | − | USP46-206 | USP46 | 536 | 1.913483309 | 0.014963 | lncRNA | hg38 |
| 707.1 | | | | | | | | | | | |
| ENST00000556 | 14 | 75278828 | 75279531 | + | FOS-209 | FOS | 596 | 1.89917802 | 4.28E−05 | lncRNA | hg38 |
| 324.2 | | | | | | | | | | | |
| ENST00000470 | 10 | 122932603 | 122952007 | − | C10orf88- | C10orf88 | 675 | 1.780977388 | 0.035682 | lncRNA | hg38 |
| 158.1 | | | | | 203 | | | | | | |
| ENST00000472 | 1 | 78649858 | 78664078 | + | IFI44-206 | IFI44 | 917 | 1.737846893 | 0.007819 | lncRNA | hg38 |
| 152.5 | | | | | | | | | | | |
| ENST00000467 | 1 | 161202349 | 161210696 | + | NDUFS2- | NDUFS2 | 1060 | 1.731979971 | 0.029773 | lncRNA | hg38 |
| 295.5 | | | | | 204 | | | | | | |
| ENST00000476 | 1 | 78620469 | 78641550 | + | IFI44L-208 | IFI44L | 890 | 1.675255629 | 0.002186 | lncRNA | hg38 |
| 876.5 | | | | | | | | | | | |
| ENST00000414 | 20 | 46901143 | 46901726 | − | AL354766.2- | AL354766.2 | 423 | 1.58201463 | 0.00836 | lncRNA | hg38 |
| 085.1 | | | | | 201 | | | | | | |
| ENST00000475 | 21 | 14224375 | 14227384 | + | RBM11-205 | RBM11 | 668 | 1.559878927 | 0.002435 | lncRNA | hg38 |
| 864.1 | | | | | | | | | | | |
| ENST00000434 | 1 | 148290890 | 148297271 | − | LINC01138- | LINC01138 | 1140 | 1.418028197 | 0.001703 | lncRNA | hg38 |
| 245.3 | | | | | 201 | | | | | | |
| ENST00000527 | 11 | 119106942 | 119107758 | − | C2CD2L- | C2CD2L | 569 | 1.408675091 | 0.006371 | lncRNA | hg38 |
| 854.1 | | | | | 203 | | | | | | |
| ENST00000480 | 1 | 85581200 | 85582099 | + | CYR61-202 | CYR61 | 551 | 1.405394963 | 0.000917 | lncRNA | hg38 |
| 413.1 | | | | | | | | | | | |
| ENST00000495 | 1 | 112699624 | 112700722 | + | MOV10-216 | MOV10 | 705 | 1.394988847 | 0.032146 | lncRNA | hg38 |
| 374.5 | | | | | | | | | | | |
| ENST00000645 | 11 | 65423125 | 65426499 | + | NEAT1-207 | NEAT1 | 3300 | 1.335075539 | 0.003829 | lncRNA | hg38 |
| 023.1 | | | | | | | | | | | |
| ENST00000567 | 16 | 56608690 | 56609497 | + | MT2A-205 | MT2A | 416 | 1.325648747 | 0.008549 | lncRNA | hg38 |
| 300.1 | | | | | | | | | | | |
| ENST00000587 | 18 | 47108378 | 47150476 | − | HDHD2-204 | HDHD2 | 788 | 1.324260422 | 0.048842 | lncRNA | hg38 |
| 841.5 | | | | | | | | | | | |
| ENST00000465 | 10 | 86958618 | 86962873 | + | SNCG-203 | SNCG | 641 | 1.314657589 | 0.002155 | lncRNA | hg38 |
| 679.5 | | | | | | | | | | | |
| ENST00000606 | 5 | 93411018 | 93438737 | − | NR2F1- | NR2F1- | 527 | 1.290120222 | 0.003102 | lncRNA | hg38 |
| 188.1 | | | | | AS1-207 | AS1 | | | | | |
| ENST00000497 | X | 106640455 | 106669212 | + | CXorf57- | CXorf57 | 682 | 1.278638922 | 0.018933 | lncRNA | hg38 |
| 124.1 | | | | | 206 | | | | | | |
| ENST00000499 | 11 | 65422774 | 65426457 | + | NEAT1-201 | NEAT1 | 3441 | 1.260273783 | 0.007866 | lncRNA | hg38 |
| 732.3 | | | | | | | | | | | |
| ENST00000587 | 17 | 60083572 | 60088467 | − | WFDC21P- | WFDC21P | 567 | 1.256508214 | 0.007955 | lncRNA | hg38 |
| 298.1 | | | | | 202 | | | | | | |
| ENST00000483 | 10 | 86959375 | 86963258 | + | SNCG-204 | SNCG | 794 | 1.237726865 | 0.000981 | lncRNA | hg38 |
| 064.1 | | | | | | | | | | | |
| ENST00000609 | 7 | 879790 | 886547 | − | AC073957.3- | AC073957.3 | 6758 | 1.222507195 | 1.87E−06 | lncRNA | hg38 |
| 998.1 | | | | | 201 | | | | | | |
| ENST00000487 | 1 | 77979175 | 78016274 | + | DNAJB4- | DNAJB4 | 949 | 1.220029424 | 0.000712 | lncRNA | hg38 |
| 931.1 | | | | | 206 | | | | | | |
| ENST00000565 | 16 | 56617476 | 56618818 | + | MT1L-201 | MT1L | 411 | 1.215439615 | 7.9E−05 | lncRNA | hg38 |
| 768.1 | | | | | | | | | | | |
| ENST00000612 | 11 | 65422804 | 65424404 | + | NEAT1-204 | NEAT1 | 1053 | 1.212262391 | 0.005812 | lncRNA | hg38 |
| 303.2 | | | | | | | | | | | |
| ENST00000587 | 18 | 23573452 | 23576947 | − | NPC1-206 | NPC1 | 590 | 1.199490404 | 0.035479 | lncRNA | hg38 |
| 223.1 | | | | | | | | | | | |
| ENST00000531 | 11 | 67215911 | 67256374 | + | KDM2A- | KDM2A | 4160 | 1.197210843 | 0.044602 | lncRNA | hg38 |
| 696.5 | | | | | 213 | | | | | | |
| ENST00000605 | 1 | 156641666 | 156644887 | − | AL365181.3- | AL365181.3 | 3222 | 1.162752946 | 2.65E−06 | lncRNA | hg38 |
| 886.1 | | | | | 201 | | | | | | |
| ENST00000448 | 1 | 156646507 | 156661424 | − | AL590666.2- | AL590666.2 | 758 | 1.134995997 | 5.86E−05 | lncRNA | hg38 |
| 869.1 | | | | | 201 | | | | | | |
| ENST00000461 | 22 | 31716727 | 31750072 | − | PRR14L- | PRR14L | 718 | 1.093319068 | 0.004039 | lncRNA | hg38 |
| 722.1 | | | | | 206 | | | | | | |
| ENST00000584 | 17 | 82101460 | 82106375 | − | CCDC57- | CCDC57 | 513 | 1.069742202 | 0.00767 | lncRNA | hg38 |
| 717.1 | | | | | 219 | | | | | | |
| ENST00000478 | 1 | 201983375 | 202003420 | + | RNPEP-207 | RNPEP | 1069 | 1.036927696 | 0.037395 | lncRNA | hg38 |
| 617.5 | | | | | | | | | | | |
| ENST00000411 | 10 | 123027534 | 123040657 | + | ACADSB- | ACADSB | 512 | 1.032057823 | 0.049295 | lncRNA | hg38 |
| 816.2 | | | | | 203 | | | | | | |
| ENST00000520 | 5 | 159227715 | 159245127 | + | LINC01932- | LINC01932 | 573 | 1.014164567 | 0.042002 | lncRNA | hg38 |
| 323.1 | | | | | 201 | | | | | | |
| ENST00000462 | 3 | 183287480 | 183298504 | + | B3GNT5- | B3GNT5 | 2748 | 1.008324327 | 4.12E−07 | lncRNA | hg38 |
| 559.1 | | | | | 203 | | | | | | |

[0030] As described herein, the compositions and methods may use a biomarker panel comprising two or more genes listed in Tables 1-3. In some embodiments, the expression levels of one or more of these genes may change (e.g., increase or decrease) as induced by a KRAS mutation. In some embodiments, the expression levels of one or more of these genes may increase or decrease as induced by a KRAS mutation. In some embodiments, the expression levels of one or more of these genes may change (e.g., increase or decrease) in one or more specific tissue types (e.g., lung, kidney, and/or pancreas tissues) as induced by a KRAS mutation.

### III. Methods of the Invention

[0031] The methods of the invention include measuring and analyzing the expression levels of one or more genes in Tables 1-3 in a biological sample from a subject and diagnosing whether the subject has cancer and/or a KRAS mutation based on the differential expression levels of the genes in the biological sample of the subject compared to the expression levels of the corresponding reference genes in a control sample from a control subject.

[0032] In some embodiments, if the gene in the biological sample from the subject displays a differential expression level relative to the corresponding reference gene in the control sample from the control subject, i.e., higher or lower than the expression level of the gene in the control sample by at least 2%, 4%, 6%, 8%, 10%, 20%, 30%, 40%, or 50%, then the subject may have cancer and/or a KRAS mutation. In certain embodiments, the cancer and/or the KRAS mutation may be in a tissue of the subject (e.g., lung).

[0033] In some embodiments, the method comprises analyzing the expression level of one or more genes involved in the interferon (IFN) alpha or gamma response. The expression level of one or more genes involved in the IFN alpha or gamma response can increase in response to a KRAS mutation. In other embodiments, the method comprises analyzing the expression level of a gene encoding pattern recognition receptor (PRR). The expression level of the gene encoding the PRR can increase in response to a KRAS mutation. In other embodiments, the method comprises analyzing the expression level of a gene encoding cytosolic RNA sensor RIG-I or MDA5. The expression level of the gene encoding the cytosolic RNA sensor RIG-I or MDA5 can increase in response to a KRAS mutation. In yet other embodiments, the method comprises analyzing the expression level of a gene encoding a KRAB zinc-finger (KZNF) protein. The expression level of a gene encoding a KZNF protein can decrease in response to a KRAS mutation.

[0034] As described herein, the methods may further comprise identifying a tissue source (e.g., lung, kidney, or pancreas tissue) of the cancer based on the differential expression levels of the one or more genes in Tables 1-3 in the biological sample compared to the expression levels of the corresponding reference genes in the control sample.

[0035] Moreover, once a subject is diagnosed to have cancer based on the differential expression levels of the genes in Tables 1-3 in the biological sample of the subject compared to the expression levels of the corresponding reference genes in the control sample from the control subject, the subject may be administered one or more anticancer agents. In certain embodiments, an anticancer agent can be an inhibitor of a KRAS mutation. In other embodiments, an anticancer agent can be an inhibitor of the gene in Tables 1-3 that is identified to have a differential expression level compared to the corresponding reference level for the gene in the control sample. Examples of inhibitors and examples of anticancer agents are described in detail further herein.

[0036] In the methods described herein, in some embodiments, the subject is suspected of having a KRAS mutation, e.g., a KRAS mutation is in a lung, kidney, or pancreas tissue of the subject.

[0037] In the methods described herein, in some embodiments, the cancer is a lung cancer (e.g., lung adenocarcinoma). The cancer may be characterized by an oncogenic defect in the RAS pathway. In particular embodiments, the oncogenic defect comprises an activating mutation in KRAS.

### IV. Inhibitors

[0038] In some embodiments of the methods described herein, an increased expression level of a gene in Tables 1-3 in a biological sample from a subject compared to a corresponding reference expression level of the same gene in a control sample from a control subject may indicate that the subject has cancer. In some embodiments of the methods described herein, once it is determined that a subject (e.g., a subject suspected of having cancer) has an increased expression level of the gene relative to a control sample, the subject may be administered a therapeutically effective amount of an inhibitor to inhibit the expression level of the gene.

[0039] An inhibitor of the gene refers to an agent that inhibits or decreases the expression level and/or the activity of the gene. An inhibitor may inhibits or decreases the transcription of the gene, binds to the gene, and/or inhibits interaction between the gene and another protein or nucleic acid. In some embodiments, an inhibitor may be an inhibitory RNA (e.g., small interfering RNA (siRNA), an antisense RNA, microRNA (miRNA), and short hairpin RNA), an aptamer, an antibody, or a small molecule.

[0040] In some embodiments, an inhibitor may be an inhibitory RNA, e.g., small interfering RNA (siRNA), an antisense RNA, microRNA (miRNA), or short hairpin RNA (shRNA). In some embodiments, the inhibitory RNA targets a sequence that is identical or substantially identical (e.g., at least 70%, at least 75%, at least 80%, at least 85%, at least 90%, at least 91%, at least 92%, at least 93%, at least 94%, at least 95%, at least 96%, at least 97%, at least 98%, or at least 99% identical) to a target sequence in the gene. A target sequence in the gene may be a portion of the gene comprising at least 20, at least 30, at least 40, at least 50, at least 60, at least 70, at least 80, at least 90, or at least 100 contiguous nucleotides, e.g., from 20-500, 20-250, 20-100, 50-500, or 50-250 contiguous nucleotides.

[0041] In some embodiments of the methods described herein, once it is determined that a subject (e.g., a subject suspected of having cancer) has an increased expression level of one or more genes in Tables 1-3 relative to a control sample, the subject may be administered a therapeutically effective amount of an siRNA that inhibits or decreases the expression level of the gene. An siRNA may be produced from a short hairpin RNA (shRNA). A shRNA is an artificial RNA molecule with a hairpin turn that can be used to silence target gene expression via the siRNA it produces in cells. See, e.g., Fire et. al., Nature 391:806-811, 1998; Elbashir et al., Nature 411:494-498, 2001; Chakraborty et al., Mol Ther Nucleic Acids 8:132-143, 2017; and Bouard et al., Br. J. Pharmacol. 157:153-165, 2009. Expression of shRNA in cells is typically accomplished by delivery of plasmids or through viral or bacterial vectors. Suitable bacterial vectors include but not limited to adeno-associated viruses (AAVs), adenoviruses, and lentiviruses. After the vector has integrated into the host genome, the shRNA is then transcribed in the nucleus by polymerase II or polymerase III (depending on the promoter used). The resulting pre-shRNA is exported from the nucleus, then processed by Dicer and loaded into the RNA-induced silencing complex (RISC). The sense strand is degraded by RISC and the antisense strand directs RISC to an mRNA that has a complementary sequence. A protein called Ago2 in the RISC then cleaves the mRNA, or in some cases, represses translation of the mRNA, leading to its destruction and an eventual reduction in the protein encoded by the mRNA. Thus, the shRNA leads to targeted gene silencing.

[0042] In some embodiments, once it is determined that a subject (e.g., a subject suspected of having cancer) has an increased expression level of one or more genes in Tables 1-3 relative to a control sample, the subject may be administered a therapeutically effective amount of an shRNA capable of hybridizing to a portion of the gene. The shRNA may be encoded in a vector. In some embodiments, the vector further comprises appropriate expression control elements known in the art, including, e.g., promoters (e.g., inducible promoters or tissue specific promoters), enhancers, and transcription terminators.

[0043] In some embodiments, once it is determined that a subject (e.g., a subject suspected of having cancer) has an increased expression level of one or more genes in Tables 1-3 relative to a control sample, the subject may be administered a therapeutically effective amount of an siRNA capable of hybridizing to a portion of the gene. The siRNA may be encoded in a vector. In some embodiments, the vector further comprises appropriate expression control elements known in the art, including, e.g., promoters (e.g., inducible promoters or tissue specific promoters), enhancers, and transcription terminators.

### V. Detecting Expression Levels

[0044] Techniques and methods for measuring the expression levels of genes are available in the art. For example, detection and/or quantification of genes in Tables 1-3 may be accomplished by any one of a number methods or assays employing recombinant DNA or RNA technologies known in the art, including but not limited to, polymerase chain reaction (PCR), single-cell RNA-sequencing, reverse transcription PCR (RT-PCR), microarrays, Northern blot, serial analysis of gene expression (SAGE), immunoassay, hybridization capture, cDNA sequencing, direct RNA sequencing, nanopore sequencing, and mass spectrometry.

[0045] In some embodiments, hybridization capture methods may be used for detection and/or quantification of the genes in Tables 1-3. Some examples of hybridization capture methods include, e.g., capture hybridization analysis of RNA targets (CHART), chromatin isolation by RNA purification (ChIRP), and RNA affinity purification (RAP). In general, cells and tissues expressing the RNA of interest can be cross-linked and solubilized by shearing. The RNA of interest can then be enriched using rationally designed biotin tagged antisense oligonucleotides. The captured RNA complexes can then be rinsed and eluted. The eluted material can be analyzed for the molecules of interest. The associated RNAs are commonly analyzed with qPCR or high throughput sequencing, and the recovered proteins can be analyzed with Western blots or mass spectrometry. General techniques for performing hybridization capture methods are described in the art and can be found in, e.g., Machyna and Simon, Briefings in Functional Genomics 17(2):96-103, 2018, which is incorporated herein by reference in its entirety. Further, Li et al, JCI Insight. 3(7):e98942, 2018 also describes methods of studying RNA (e.g., extracellular RNA) and is incorporated herein by reference in its entirety.

[0046] In some embodiments, microarrays may be used to measure the expression levels of the genes. An advantage of microarray analysis is that the expression of each of the genes can be measured simultaneously, and microarrays can be specifically designed to provide a diagnostic expression profile for a particular disease or condition (e.g., cancer). Microarrays may be prepared by selecting probes which comprise a polynucleotide sequence, and then immobilizing such probes to a solid support or surface. For example, the probes may comprise DNA sequences, RNA sequences, or copolymer sequences of DNA and RNA. The polynucleotide sequences of the probes may also comprise DNA and/or RNA analogues, or combinations thereof. For example, the polynucleotide sequences of the probes may be full or partial fragments of genomic nucleic acids. The polynucleotide sequences of the probes may also be synthesized nucleotide sequences, such as synthetic oligonucleotide sequences. Probes may be immobilized to a solid support which may be either porous or non-porous. For example, the probes may be polynucleotide sequences which are attached to a nitrocellulose or nylon membrane or filter covalently at either the 3′ or the 5′ end of the polynucleotide. Such hybridization probes are well-known in the art (see, e.g., Sambrook, et al., Molecular Cloning: A Laboratory Manual (3rd Ed., 2001). In one embodiment, a microarray may include a support or surface with an ordered array of binding (e.g., hybridization) sites or “probes” each representing one of the genes described herein. More specifically, each probe of the array may be located at a known, predetermined position on the solid support such that the identity (i.e., the sequence) of each probe can be determined from its position in the array (i.e., on the support or surface). Each probe may be covalently attached to the solid support at a single site.

[0047] Quantitative reverse transcriptase PCR (qRT-PCR) can also be used to determine the expression profiles of the genes. The first step in gene expression profiling by RT-PCR is the reverse transcription of the RNA template into cDNA, followed by its exponential amplification in a PCR reaction. The two most commonly used reverse transcriptases are avilo myeloblastosis virus reverse transcriptase (AMY-RT) and Moloney murine leukemia virus reverse transcriptase (MLVRT). The reverse transcription step is typically primed using specific primers, random hexamers, or oligo-dT primers, depending on the circumstances and the goal of expression profiling. For example, extracted RNA can be reverse-transcribed using a GeneAmp RNA PCR kit (Perkin Elmer, CA, USA), following the manufacturer's instructions. The derived cDNA can then be used as a template in the subsequent PCR reaction. Although the PCR step can use a variety of thermostable DNA-dependent DNA polymerases, it typically employs the Taq DNA polymerase, which has a 5′-3′ nuclease activity but lacks a 3′-5′ proofreading endonuclease activity. Thus, TAQMAN PCR typically utilizes the 5′-nuclease activity of Taq polymerase to hydrolyze a hybridization probe bound to its target amplicon, but any enzyme with equivalent 5′ nuclease activity can be used. Two oligonucleotide primers are used to generate an amplicon typical of a PCR reaction. A third oligonucleotide, or probe, may be designed to detect nucleotide sequence located between the two PCR primers. The probe is non-extendible by Taq DNA polymerase enzyme, and may be labeled with a reporter fluorescent dye and a quencher fluorescent dye. Any laser-induced emission from the reporter dye is quenched by the quenching dye when the two dyes are located close together as they are on the probe. During the amplification reaction, the Taq DNA polymerase enzyme cleaves the probe in a template-dependent manner. The resultant probe fragments disassociate in solution, and signal from the released reporter dye is free from the quenching effect of the second fluorophore. One molecule of reporter dye is liberated for each new molecule synthesized, and detection of the unquenched reporter dye provides the basis for quantitative interpretation of the data.

[0048] Serial Analysis Gene Expression (SAGE) can also be used to determine RNA expression level. SAGE analysis does not require a special device for detection, and may be used for simultaneously detecting the expression of a large number of transcription products. First, RNA is extracted, converted into cDNA using a biotinylated oligo (dT) primer, and treated with a four-base recognizing restriction enzyme (Anchoring Enzyme: AE) resulting in AE-treated fragments containing a biotin group at their 3′ terminus. Next, the AE-treated fragments are incubated with streptavidin for binding. The bound cDNA is divided into two fractions, and each fraction is then linked to a different double-stranded oligonucleotide adapter (linker) A or B. These linkers are composed of: (1) a protruding single strand portion having a sequence complementary to the sequence of the protruding portion formed by the action of the anchoring enzyme, (2) a 5′ nucleotide recognizing sequence of the IIS-type restriction enzyme (cleaves at a predetermined location no more than 20 bp away from the recognition site) serving as a tagging enzyme (TE), and (3) an additional sequence of sufficient length for constructing a PCR-specific primer. The linker-linked cDNA is cleaved using the tagging enzyme, and only the linker-linked cDNA sequence portion remains, which is present in the form of a short-strand sequence tag. Next, pools of short-strand sequence tags from the two different types of linkers are linked to each other, followed by PCR amplification using primers specific to linkers A and B. As a result, the amplification product is obtained as a mixture comprising myriad sequences of two adjacent sequence tags (ditags) bound to linkers A and B. The amplification product is treated with the anchoring enzyme, and the free ditag portions are linked into strands in a standard linkage reaction. The amplification product is then cloned. Determination of the clone's nucleotide sequence can be used to obtain a readout of consecutive ditags of constant length. The presence of the gene corresponding to each tag can then be identified from the nucleotide sequence of the clone and information on the sequence tags.

[0049] One of skill in the art, when provided with the set of genes in Tables 1-3 to be identified and quantified, will be capable of selecting the appropriate assay for performing the methods disclosed herein.

### VI. Anticancer Agents

[0050] In methods described herein, a subject may be administered one or more anticancer agents alone or in combination with one or more inhibitors that inhibit the expression levels of one or more genes in Tables 1-3. An anticancer agent may be a cytotoxic agent, a chemotherapeutic agent, or an immunosuppressive agent. An anticancer agent may be a natural or synthetic agent. In some embodiments, an anticancer agent may be capable of treating cancer, activating immune response, and/or reducing tumor load. In some embodiments, an anticancer agent may inhibit the proliferation of and/or kill cancer cells. An anticancer agent may be a small molecule, a peptide, or a protein. In some embodiments, an anticancer agent may be an agent that inhibits and/or down regulates the activity of a protein that prevents immune cell activation or a protein that exerts immunosuppressive effects.

[0051] Examples of anticancer agents include, but are not limited to, alkylating agents such as thiotepa and cyclosphosphamide (CYTOXAN®); alkyl sulfonates such as busulfan, improsulfan and piposulfan; aziridines such as benzodopa, carboquone, meturedopa, and uredepa; ethylenimines and methylamelamines including altretamine, triethylenemelamine, triethyl lenephosphoramide, triethyl lenethiophosphoramide and trimethylmelamine; acetogenins (especially bullatacin and bullatacinone); delta-9-tetrahydrocannabinol (dronabinol, MARINOL®); beta-lapachone; lapachol; colchicines; betulinic acid; a camptothecin (including the synthetic analogue topotecan (HYCAMTIN®), CPT-11 (irinotecan, CAMPTOSAR®), acetylcamptothecin, scopoletin, and 9)-aminocamptothecin); bryostatin; callystatin; CC-1065 (including its adozelesin, carzelesin and bizelesin synthetic analogues); podophyllotoxin; podophyllinic acid; teniposide; cryptophycins (particularly cryptophycin 1 and cryptophycin 8); dolastatin; duocarmycin (including the synthetic analogues, KW-2189 and CB1-TM1); eleutherobin; pancratistatin; a sarcodictyin; spongistatin; nitrogen mustards such as chlorambucil, chlornaphazine, chlorophosphamide, estramustine, ifosfamide, mechlorethamine, mechlorethamine oxide hydrochloride, melphalan, novembichin, phenesterine, prednimustine, trofosfamide, uracil mustard; nitrosoureas such as carmustine, chlorozotocin, fotemustine, lomustine, nimustine, and ranimnustine; antibiotics such as the enediyne antibiotics (e.g., calicheamicin, especially calicheamicin gamma1I and calicheamicin omegaI1 (see, e.g., Nicolaou et al. Angew. Chem Intl. Ed. Engl., 33: 183-186 (1994)); CDP323, an oral alpha-4 integrin inhibitor; dynemicin, including dynemicin A; an esperamicin; neocarzinostatin chromophore and related chromoprotein enediyne antibiotic chromophores), aclacinomysins, actinomycin, authramycin, azaserine, bleomycin, cactinomycin, carabicin, caminomycin, carzinophilin, chromomycins, dactinomycin, daunorubicin, detorubicin, 6-diazo-5-oxo-L-norleucine, doxorubicin (including ADRIAMYCIN®, morpholino-doxorubicin, cyanomorpholino-doxorubicin, 2-pyrrolino-doxorubicin, doxorubicin HCl liposome injection (DOXIL®), liposomal doxorubicin TLC D-99 (MYOCET®), peglylated liposomal doxorubicin (CAELYX®), and deoxydoxorubicin), epirubicin, esorubicin, idarubicin, marcellomycin, mitomycins such as mitomycin C, mycophenolic acid, nogalamycin, olivomycins, peplomycin, porfiromycin, puromycin, quelamycin, rodorubicin, streptonigrin, streptozocin, tubercidin, ubenimex, zinostatin, zorubicin; anti-metabolites such as methotrexate, gemcitabine (GEMZAR®), tegafur (UFTORAL®), capecitabine (XELODA®), an epothilone, and 5-fluorouracil (5-FU); combretastatin; folic acid analogues such as denopterin, methotrexate, pteropterin, trimetrexate; purine analogs such as fludarabine, 6-mercaptopurine, thiamiprine, thioguanine; pyrimidine analogs such as ancitabine, azacitidine, 6-azauridine, 5-azacytidine, carmofur, cytarabine, dideoxyuridine, doxifluridine, enocitabine, floxuridine; androgens such as calusterone, dromostanolone propionate, epitiostanol, mepitiostane, testolactone; anti-adrenals such as aminoglutethimide, mitotane, trilostane; folic acid replenisher such as frolinic acid; aceglatone; aldophosphamide glycoside; aminolevulinic acid; eniluracil; amsacrine; bestrabucil; bisantrene; edatraxate; defofamine; demecolcine; diaziquone; elformithine; elliptinium acetate; an epothilone; etoglucid; gallium nitrate; hydroxyurea; lentinan; lonidainine; maytansinoids such as maytansine and ansamitocins; mitoguazone; mitoxantrone; mopidanmol; nitraerine; pentostatin; phenamet; pirarubicin; losoxantrone; 2-ethylhydrazide; procarbazine; PSK® polysaccharide complex (JHS Natural Products, Eugene, Oreg.); razoxane; rhizoxin; sizofuran; spirogermanium; tenuazonic acid; triaziquone; 2,2′,2′-trichlorotriethylamine; trichothecenes (especially T-2 toxin, verracurin A, roridin A and anguidine); urethan; vindesine (ELDISINE®, FILDESIN®); dacarbazine; mannomustine; mitobronitol; mitolactol; pipobroman; gacytosine; arabinoside (“Ara-C”); thiotepa; taxoid, e.g., paclitaxel (TAXOL®, Bristol-Myers Squibb Oncology, Princeton, N.J.), albumin-engineered nanoparticle formulation of paclitaxel (ABRAXANE™), and docetaxel (TAXOTERE®, Rhome-Poulene Rorer, Antony, France); chloranbucil; 6-thioguanine; mercaptopurine; methotrexate; platinum agents such as cisplatin, oxaliplatin (e.g., ELOXATIN®), and carboplatin; vincas, which prevent tubulin polymerization from forming microtubules, including vinblastine (VELBAN®), vincristine (ONCOVIN®), vindesine (ELDISINE®, FILDESIN®), and vinorelbine (NAVELBINE®); etoposide (VP-16); ifosfamide; mitoxantrone; leucovorin; novantrone; edatrexate; daunomycin; aminopterin; ibandronate; topoisomerase inhibitor RFS 2000; difluoromethylornithine (DMFO); retinoids such as retinoic acid, including bexarotene (TARGRETIN®); bisphosphonates such as clodronate (for example, BONEFOS® or OSTAC®), etidronate (DIDROCAL®), NE-58095, zoledronic acid/zoledronate (ZOMETA®), alendronate (FOSAMAX®), pamidronate (AREDIA®), tiludronate (SKELID®), or risedronate (ACTONEL®); troxacitabine (a 1,3-dioxolane nucleoside cytosine analog); antisense oligonucleotides, particularly those that inhibit expression of genes in signaling pathways implicated in aberrant cell proliferation, such as, for example, PKC-alpha, Raf, H-Ras, and epidermal growth factor receptor (EGF-R) (e.g., erlotinib (Tarceva™)); and VEGF-A that reduce cell proliferation; vaccines such as THERATOPE® vaccine and gene therapy vaccines, for example, ALLOVECTIN® vaccine, LEUVECTIN® vaccine, and VAXID® vaccine; topoisomerase 1 inhibitor (e.g., LURTOTECAN®); rmRH (e.g., ABARELIX®); BAY439006 (sorafenib; Bayer); SU-11248 (sunitinib, SUTENT®, Pfizer); perifosine, COX-2 inhibitor (e.g. celecoxib or etoricoxib), proteosome inhibitor (e.g. PS341); bortezomib (VELCADE®); CCI-779; tipifarnib (R11577); orafenib, ABT510); Bcl-2 inhibitor such as oblimersen sodium (GENASENSE®); pixantrone; EGFR inhibitors; tyrosine kinase inhibitors; serine-threonine kinase inhibitors such as rapamycin (sirolimus, RAPAMUNE®); farnesyltransferase inhibitors such as lonafarnib (SCH 6636, SARASAR™); and pharmaceutically acceptable salts, acids or derivatives of any of the above; as well as combinations of two or more of the above such as CHOP, an abbreviation for a combined therapy of cyclophosphamide, doxorubicin, vincristine, and prednisolone; and FOLFOX, an abbreviation for a treatment regimen with oxaliplatin (ELOXATIN™) combined with 5-FU and leucovorin.

[0052] In some embodiments, an anticancer agent is cisplatin, carboplatin, oxaliplatin, bleomycin, mitomycin C, calicheamicins, maytansinoids, doxorubicin, idarubicin, daunorubicin, epirubicin, busulfan, carmustine, lomustine, semustine, methotrexate, 6-mercaptopurine, fludarabine, 5-azacytidine, pentostatin, cytarabine, gemcitabine, 5-fluorouracil, hydroxyurea, etoposide, teniposide, topotecan, irinotecan, chlorambucil, cyclophosphamide, ifosfamide, melphalan, bortezomib, vincristine, vinblastine, vinorelbine, paclitaxel, or docetaxel.

### Chemotherapeutic Agent

[0053] In some embodiments, the anticancer agent is a chemotherapeutic agent. In some embodiments, chemotherapeutic agents may kill cancer cells or inhibit cancer cell growth. Chemotherapeutic agents may function in a non-specific manner, for example, inhibiting the process of cell division known as mitosis. Examples of chemotherapeutic agents include, but are not limited to, antimicrotubule agents (e.g., taxanes and vinca alkaloids), topoisomerase inhibitors and antimetabolites (e.g., nucleoside analogs acting as such, for example, Gemcitabine), mitotic inhibitors, alkylating agents, antimetabolites, antitumor antibiotics, mitotic inhibitors, anthracyclines, intercalating agents, agents capable of interfering with a signal transduction pathway, agents that promote apoptosis, proteosome inhibitors, and alike.

[0054] Alkylating agents are most active in the resting phase of the cell. These types of drugs are cell-cycle non-specific. Exemplary alkylating agents include, but are not limited to, nitrogen mustards, ethylenimine derivatives, alkyl sulfonates, nitrosoureas and triazenes); uracil mustard (Aminouracil Mustard®, Chlorethaminacil®, Demethyldopan®, Desmethyldopan®, Haemanthamine®, Nordopan®, Uracil nitrogen Mustard®, Uracillost®, Uracilmostaza®, Uramustin®, Uramustine®), chlormethine (Mustargen®), cyclophosphamide (Cytoxan®), Neosar®, Clafen®, Endoxan® Procytox®, Revimmune™), ifosfamide (Mitoxana®), melphalan (Alkeran®), Chlorambucil (Leukeran®), pipobroman (Amedel®, Vercyte®), triethylenemelamine (Hemel®, Hexalen®, Hexastat®), triethylenethiophosphoramine, thiotepa (Thioplex®), busulfan (Busilvex®, Myleran®), carmustine (BiCNU®), lomustine (CeeNU®), streptozocin (Zanosar®), and Dacarbazine (DTIC-Dome®). Additional exemplary alkylating agents include, without limitation, Oxaliplatin (Eloxatin®); Temozolomide (Temodar® and Temodal®); Dactinomycin (also known as actinomycin-D, Cosmegen®); Melphalan (also known as L-PAM, L-sarcolysin, and phenylalanine mustard, Alkeran®); Altretamine (also known as hexamethylmelamine (HMM), Hexalen®); Carmustine (BICNU®); Bendamustine (Treanda®); Busulfan (Busulfex® and Myleran®); Carboplatin (Paraplatin®); Lomustine (also known as CCNU, CeeNU®); Cisplatin (also known as CDDP, Platinol® and Platinol®-AQ); Chlorambucil (Leukeran®); Cyclophosphamide (Cytoxan® and Neosar®); Dacarbazine (also known as DTIC, DIC and imidazole carboxamide, DTIC-Dome®); Altretamine (also known as hexamethylmelamine (HMM), Hexalen®); Ifosfamide (Ifex®); Prednumustine; Procarbazine (Matulane®); Mechlorethamine (also known as nitrogen mustard, mustine and mechloroethamine hydrochloride, Mustargen®); Streptozocin (Zanosar®); Thiotepa (also known as thiophosphoamide, TESPA and TSPA, Thioplex®); Cyclophosphamide (Endoxan®, Cytoxan®, Neosar®, Procytox®, Revimmune®); and Bendamustine HCl (Treanda®).

[0055] Antitumor antibiotics are chemotherapeutic agents obtained from natural products produced by species of the soil fungus, e.g., Streptomyces. These drugs act during multiple phases of the cell cycle and are considered cell-cycle specific. There are several types of antitumor antibiotics, including but are not limited to anthracyclines (e.g., Doxorubicin, Daunorubicin, Epirubicin, Mitoxantrone, and Idarubicin), chromomycins (e.g., Dactinomycin and Plicamycin), mitomycin, and bleomycin.

[0056] Antimetabolites are types of chemotherapeutic agents that are cell-cycle specific. When cells incorporate these antimetabolite substances into the cellular metabolism, they are unable to divide. This class of chemotherapeutic agents include folic acid antagonists such as Methotrexate; pyrimidine antagonists such as 5-Fluorouracil, Foxuridine, Cytarabine, Capecitabine, and Gemcitabine; purine antagonists such as 6-Mercaptopurine and 6-Thioguanine; Adenosine deaminase inhibitors such as Cladribine, Fludarabine, Nelarabine and Pentostatin.

[0057] Exemplary anthracyclines that can be used include, e.g., doxorubicin (Adriamycin® and Rubex®); Bleomycin (Lenoxane®); Daunorubicin (dauorubicin hydrochloride, daunomycin, and rubidomycin hydrochloride, Cerubidine®); Daunorubicin liposomal (daunorubicin citrate liposome, DaunoXome®); Mitoxantrone (DHAD, Novantrone®); Epirubicin (Ellence); Idarubicin (Idamycin®, Idamycin PFS®); Mitomycin C (Mutamycin®); Geldanamycin; Herbimycin; Ravidomycin; and Desacetylravidomycin.

[0058] Antimicrotubule agents include vinca alkaloids and taxanes. Exemplary vinca alkaloids include, but are not limited to, vinorelbine tartrate (Navelbine®), Vincristine (Oncovin®), and Vindesine (Eldisine®); vinblastine (also known as vinblastine sulfate, vincaleukoblastine and VLB, Alkaban-AQ® and Velban®); and vinorelbine (Navelbine®). Exemplary taxanes that can be used include, but are not limited to paclitaxel and docetaxel. Non-limiting examples of paclitaxel agents include nanoparticle albumin-bound paclitaxel (ABRAXANE, marketed by Abraxis Bioscience), docosahexaenoic acid bound-paclitaxel (DHA-paclitaxel. Taxoprexin, marketed by Protarga), polyglutamate bound-paclitaxel (PG-paclitaxel, paclitaxel poliglumex, CT-2103, XYOTAX, marketed by Cell Therapeutic), the tumor-activated prodrug (TAP), ANG105 (Angiopep-2 bound to three molecules of paclitaxel, marketed by ImmunoGen), paclitaxel-EC-1 (paclitaxel bound to the erbB2-recognizing peptide EC-1; see Li et al., Biopolymers (2007) 87:225-230), and glucose-conjugated paclitaxel (e.g., 2′-paclitaxel methyl 2-glucopyranosyl succinate, see Liu et al., Bioorganic & Medicinal Chemistry Letters (2007) 17:617-620).

[0059] Exemplary proteosome inhibitors that can be used include, but are not limited to, Bortezomib (Velcade®); Carfilzomib (PX-171-007, (S)-4-Methyl-N—((S)-1-(((S)-4-methyl-1-((R)-2-methyloxiran-2-yl)-1-oxope-ntan-2-yl)amino)-1-oxo-3-phenylpropan-2-yl)-2-((S)-2-(2-morpholinoacetamid-o)-4-phenylbutanamido)-pentanamide); marizomib (NPI-0052); ixazomib citrate (MLN-9708); delanzomib (CEP-18770); and O-Methyl-N-[(2-methyl-5-thiazolyl)carbonyl]-L-seryl-O-methyl-N-[(1S)-2-[(-2R)-2-methyl-2-oxiranyl]-2-oxo-1-(phenylmethyl)ethyl]-L-serinamide (ONX-0912).

[0060] In some embodiments, the chemotherapeutic agent is selected from the group consisting of chlorambucil, cyclophosphamide, ifosfamide, melphalan, streptozocin, carmustine, lomustine, bendamustine, uramustine, estramustine, carmustine, nimustine, ranimustine, mannosulfan busulfan, dacarbazine, temozolomide, thiotepa, altretamine, 5-fluorouracil (5-FU), 6-mercaptopurine (6-MP), capecitabine, cytarabine, floxuridine, fludarabine, gemcitabine, hydroxyurea, methotrexate, pemetrexed, daunorubicin, doxorubicin, epirubicin, idarubicin, SN-38, ARC, NPC, campothecin, topotecan, 9-nitrocamptothecin, 9-aminocamptothecin, rubifen, gimatecan, diflomotecan, BN80927, DX-895 If, MAG-CPT, amsacrine, etoposide, etoposide phosphate, teniposide, doxorubicin, paclitaxel, docetaxel, gemcitabine, accatin III, 10-deacetyltaxol, 7-xylosyl-10-deacetyltaxol, cephalomannine, 10-deacetyl-7-epitaxol, 7-epitaxol, 10-deacetylbaccatin III, 10-deacetyl cephalomannine, gemcitabine, Irinotecan, albumin-bound paclitaxel, Oxaliplatin, Capecitabine, Cisplatin, docetaxel, irinotecan liposome, and etoposide, and combinations thereof.

[0061] In certain embodiments, the chemotherapeutic agent is administered at a dose and a schedule that may be guided by doses and schedules approved by the U.S. Food and Drug Administration (FDA) or other regulatory body, subject to empirical optimization.

[0062] In still further embodiments, more than one chemotherapeutic agent may be administered simultaneously, or sequentially in any order during the entire or portions of the treatment period. The two agents may be administered following the same or different dosing regimens.

### EXAMPLES

### Example 1—Materials and Methods

### Cell Lines

[0063] The AALE stable cell lines pBABE-mCherry Puro (control) and pBABE-FLAG-KRAS(G12) Zeo (mutant KRAS) were generated using retroviral transduction, followed by selection in puromycin of zeocin, respectively, 2 days post-infection. Both lines were cultured in SABM Basal Medium (Lonza SABM basal medium) with added supplements and growth factors (Lonza SAGM SingleQuot Kit Suppl. & Growth Factors). AALE cell lines were maintained using Lonza's Reagent Pack subculture reagents. The HA1E cell lines were generated using lentiviral transduction (pLX317) to generate control and mutant HA1E pLX317-KRAS(G12) stable cell lines using puromycin selection, and cells were cultured in MEM-alpha (Invitrogen) with 10% FBS (Sigma) and 1% penicillin/streptomycin (Gibco). All cell lines tested negative for mycoplasma.

siRNA Knockdowns

[0064] AALEs were seeded at 1×10⁶ cells per well of a 6-well plate in complete growth medium, then reverse transfected with 30 pmol siRNA using RNAiMAX lipofectamine according to manufacturer's protocol. Cells were grown for 3 days in transfection medium under standard culture conditions and then harvested for RNA isolation and qPCR as previously described.

### Cell Viability Assay

[0065] 2×10⁴ cells were subtracted from each siRNA transfection well at the time of transfection and seeded into individual wells of an ultra-low adhesion 96-well plate. The cells were grown in standard culture conditions for 4 days. They were then harvested, and ATP production was measured using the Cell TiterGLO Luminescent Cell Viability Assay (Promega) following the manufacturer's protocol. Luminescence was measured on a Perkin Elmer VICTOR light 1420 Luminescence Counter.

### RNA Isolation & Purification

[0066] For AALE cell lines, bulk RNA was isolated from cells using Quick-RNA MiniPrep kit (Zymogen). All RNA was quantified via NanoDrop-8000 Spectrophotometer. For HA1E cell lines, bulk RNA was isolated using RNeasy Mini Kit (Qiagen) and quantified via Qubit RNA BR assay kit (Thermo).

qPCR

[0067] cDNA was transcribed from lug RNA using iScript cDNA Synthesis Kit (Bio-Rad) according to manufacturer protocol. cDNA was diluted 1:6 and run with iTaq Universal SYBR Green Supermix (Bio-Rad) on ViiA 7 Real-Time PCR System according to manufacturer protocol. Cycle Threshold (CT) values were converted using Standard analysis. Values obtained for target genes were normalized to HPRT.

### Library Preparation for Bulk RNAseq

[0068] For AALE cell lines, lug of total RNA was used as input for the TruSeq Stranded mRNA Sample Prep Kit (Illumina) according to manufacturer protocol. Library quality was determined through the High Sensitivity DNA Kit on a Bioanalyzer 2100 (Agilent Technologies). Multiplexed libraries were sequenced as HiSeq400 100PE runs. For HA1E cell lines, lug of total RNA was used for mRNA enrichment with Dynabeads mRNA DIRECT kit (Thermo). First strand cDNA was generated with AffinityScript Multiple Temperature reverse transcriptase with oligo dT primers. Second strand cDNA was generated with mRNA Second Strand Synthesis Module (New England Biolab). DNA was cleaned up with Agencourt AMPure XP beads twice. Qubit dsDNA High Sensitivity Assay was used for concentration measurement. 1 ng of dsDNA was further subjected to library preparation with Nextera XT DNA sample prep kit (Illumina) per manufacturer instructions. Library size distribution was confirmed with Bioanalyzer (Agilent). Multiplexed libraries were sequenced as NextSeq500 75PE runs.

### Library Preparation for Single Cell RNAseq

[0069] For single cell RNAseq, 1×10⁶ cells were harvested and re-suspended in 1 mL 1×PBS/0.04% BSA (1000 cells/ul) according to the cell preparation guidelines in the 10× Genomics Chromium Single Cell 3′ Reagent Kit User Guide. GEMs were generated from an input of 3,500 cells. We used the 10× Genomics Chromium Single Cell 3′ Reagent Kits version 2 for both the GEM generation and subsequent library preparation and followed the manufacturer's reagent kit protocol. Quantification of all RNAseq libraries was performed by QB3 at UC Berkeley. RNAseq libraries were sequenced as HiSeq4000 100PE runs.

### Statistical Analysis

[0070] All quantitative data for functional assays has been reported as means±standard deviation. Statistical significance for these was calculated using a t-test and p-values<0.05 were considered significant.

### RNA-seq Pseudoalignment and Quantification

[0071] All fastq files were trimmed with Trimmomatic 2 (0.38) [ ] using the Illumina NextSeq PE adapters. The resulting trimmed files were assessed with FastQC [ ] and then passed through the following analytical pipeline:

[0072] Salmon (0.14.1): pseudoalignment of RNA-seq reads performed with Salmon [ ] using the following arguments:
[0073] -validateMappings -rangeFactorizationBins 4 -gcBias -numBootstraps 10
[0074] using an index created from the GENCODE version 29 transcriptome fasta file using standard arguments.

[0075] Sleuth (0.30.0): transcript differential expression was performed using Sleuth [ ] and Wasabi (1.0.1) to convert the Salmon output into the proper format. Upon completion, the transcripts with q-values below 0.05 in the likelihood-ratio test were used to filter salmon output from which log 2fc was manually calculated and paired to the sleuth output.

[0076] DESeq2 (1.24.0): Salmon output was imported into a DESeq object using tximport [ ] and differential expression analysis was performed with standard arguments.

### Transposable Element Content Analysis

[0077] Exon and 5′/3′ UTR Overlap: a whole genome .gtf file was downloaded from the UCSC genome browser Table browser utility. This file was parsed and merged with the GENCODE v.29 reference transcriptome. This modified .gtf (now a .bed file) was passed to bedtools [ ] where the overlap function was used with the following arguments:
[0078] a modified.gtf.bed -b all.ucsc.rmsk.genes.bed -wao -s>retained.overlap.bed
[0079] alongside a whole genome .gtf retrieved as described above except generated from the repeat-masked browser track. The resulting overlapped bed file was processed and visualized using custom R scripts.

[0080] Differential Expression: Differential transcript abundance was determined using the Salmon and Sleuth procedures described above provided with a custom index comprising both the GENCODE version 29 transcripts and all transcripts extracted from the Hammel lab GTF file as described in the single cell procedures. Sleuth output was filtered and visualized using R and Tidyverse.

### Zinc Finger Protein Analysis

[0081] ChIP-exo data and supplementary information were extracted from supplementary data provided by Imbeault et al [ ]. ZNF genes were cross referenced with DESeq2 and RepeatMasker outputs to extract relevant differential expression data of ZNF proteins and Transposable Element transcripts using R. RepeatMasker output from promoter analyses was cross referenced with ChIP-exo target data to identify potential regulatory targets of differentially expressed KZNFs. Only KZNF targets with ‘score’ [see Imbeault et al]>=75 were kept for analysis. Analysis of all data was performed and visualized in R using custom scripts.

### Gene Set Enrichment Analysis

[0082] Genes determined to be significantly differentially expressed in DESeq2 output were first ‘pre-ranked’ in R by the following metric:

Score metric=sin(log 2FoldChange)*−log₁₀(p-value)

The resulting ranked files objects were processed using the R package fgsea [ ] alongside gene set files downloaded from msigdb [ ] using the R package msigdbr [ ]. Additional code was written for select vizualizations.

### Gene Ontology Analysis

[0083] Upregulated gene names were extracted from DESeq2 output using bash command line tools. Name lists were pasted into the Gene Ontology Consortium's Enrichment Analysis tool powered by PANTHER. Output data was exported as .txt files and parsed using bash command line tools. Parsed data was visualized using custom R scripts.

### Single Cell Analysis

[0084] 10× Processing: Single cell output data was processed using 10× pipeline CellRanger [The mkfastq functionality was used to generate fastq files for further downstream analysis. Output was also aggregated and quantified using the aggr and count functionalities, respectively. This output was visualized using the 10× Loupe browser.

[0085] Downstream Analysis: fastq files generated above were passed to Salmn alevin [ ] with the following arguments:
[0086] -libtype A -chromium -dumpCsvCounts -p 16.
[0087] alevin was used to psuedoalign the libraries to both the GENCODE v.29 reference transcriptome as well as a composite transcriptome reference built by combining the GENCODE v.29 reference with one built from the GRCh38_rmsk_TE.gtf hosted by the Hammel lab. A salmon index was built from this reference with standard arguments. These alevin output matrices were imported into R using tximport. GSEA/cluster correlations were calculated using the R corr( ) function. Normalization and clustering were performed with Seurat [ ] and additional code was written to handle select visualizations.

### TCGA ZNF Analysis

[0088] TCGA-LUAD and GTEX lung phenotype and normalized count data were downloaded from the UCSC Xena browser TOIL data repository. The files were combined and patients were grouped by their KRAS mutation status and identity. These data were compared to and visualized alongside of data generated from our analysis using custom R code. Significance was determined with a one-way t test implemented in the R t.test( ) function.

### Example 2—Transcriptome Analysis of Transformed Human Lung Epithelial (AALE) Cells

[0089] The transcriptomes of AALE cells transduced with control vector and the transcriptomes of AALE cells transduced by mutant KRAS were compared and analyzed. Hundreds of lncRNAs were upregulated (n=279) or downregulated (n=409) by oncogenic RAS signaling, as well as many protein-coding mRNAs (n=4323 up, n=4711 down) (FIG. 1A) and transcripts with retained introns (n=165 up, n=195) (FIG. 5A), revealing the broad extent to which mutant KRAS reprograms the coding and noncoding transcriptome. Compared to transcripts that were expressed but unchanged in the mutant KRAS versus control AALEs, a larger proportion of upregulated or downregulated lncRNAs and protein-coding mRNAs were comprised of TE sequences, while upregulated intron-retaining transcripts were also enriched for TEs (FIG. 5B), suggesting that TE sequence-containing loci in the genome are preferentially misregulated during malignant transformation.

[0090] To explore the biological pathways that are perturbed by oncogenic RAS signaling, we performed gene set enrichment analysis (GSEA) (11) using genes that were differentially expressed in our mutant KRAS AALE cells. GSEA revealed that the most significantly enriched pathway was the interferon (IFN) alpha response, while the third most enriched pathway was IFN gamma response (FIG. 1B). These results indicate that mutant KRAS activates an innate immune response in transformed AALEs.

### Example 3—Mutant RAS-Mediated IFN Response

[0091] We then investigated whether this mutant RAS-mediated IFN response was specific to lung cells or if unrelated cell types responded similarly. We performed RNA-seq on human embryonic kidney cells (HA1E) that were primed for oncogenic RAS-driven transformation (12) and analyzed how mutant KRAS altered their transcriptomes. We also observed that hundreds of lncRNAs were upregulated (n=165) or downregulated (n=223), along with protein-coding mRNAs (n=2635 up, n=2639 down) (FIG. 1C) and retained-intron transcripts (n=119 up, n=237 down) (FIG. 5C), similar to what we found using mutant KRAS AALE cells. Moreover, differentially expressed RNAs were again enriched for TE sequences (FIG. 5D). When we performed GSEA, however, there was no enrichment for any IFN pathways in mutant KRAS-transformed HA1E cells, even though they were most significantly enriched for upregulated KRAS signaling (FIG. 1D). We found that both IFN gamma and IFN alpha response pathways were among the most significantly decreased gene sets (FIG. 1D), highlighting the tissue-specific differences in how the transcriptome is remodeled by mutant KRAS.

[0092] To further elucidate the interferon response in mutant KRAS AALE cells, we compared the expression patterns of differentially expressed IFN-stimulated genes in transformed AALEs and HA1E cells. AALEs with oncogenic RAS signaling upregulated the expression of pattern recognition receptors (PRR) and cytosolic RNA sensors RIG-I and MDA5 (FIG. 2A) (13), while mutant KRAS HA1E cells showed no significant changes in their expression (FIG. 2B). To determine the functional significance of PRR upregulation in the context of RAS-driven cellular transformation, we next performed knockdown studies of RIG-I and MDA5 in mutant KRAS AALE cells. RNA interference-mediated knockdown of KRAS, RIG-I, or MDA5 all resulted in significant loss of cell viability (FIG. 2C), revealing the requirement for heightened levels of RIG-I and MDA5 expression in transformed AALE cells.

### Example 4—Molecular Basis for IFN Pathway Activation in Mutant KRAS AALE Cells

[0093] We next investigated the molecular basis for IFN pathway activation in mutant KRAS AALE cells by analyzing the abundance of TE-derived noncoding RNAs, which induce an IFN response in cancer cells when aberrantly expressed (14, 15). The LINE-1 elements L1MEc, L1MD2, and L1MC4a, the ERVL-MaLR element THE1D, and the hAT-Charlie element MER20) were all significantly upregulated in mutant KRAS AALE cells (FIG. 2D) but not in mutant KRAS HA1E cells (FIG. 2E), suggesting that oncogenic KRAS signaling induces an IFN response in transformed lung cells through a tissue-specific set of TE-derived noncoding RNAs.

### Example 5—Single-Cell RNA-Seq

[0094] To further characterize the nature of the IFN response in mutant KRAS AALEs, we performed single-cell RNA-seq (scRNA-seq) (n=1503 cells) (FIG. 3A), which revealed that the IFN beta (FIG. 3B), alpha and gamma (FIGS. 6A and 6B) gene signatures were heterogeneously activated in KRAS-transformed AALEs, with a small fraction of individual cells exhibiting very high expression levels of each IFN gene signature. We then analyzed the scRNA-seq data using a RIG-I/MDA5 induction gene signature, which showed that a large fraction of individual cells within this population displayed prominent levels of this PRR signature (FIG. 3C).

[0095] We then examined which TE RNAs might be involved in IFN-stimulated gene expression by analyzing scRNA-seq clusters (FIG. 3A) for correlation between TE RNA expression and IFN gene signatures (16). LINE and MER elements were the most highly correlated TE classes with the IFN gamma gene signature in cluster 3 (FIG. 3D), while Alu and LINE elements were highly correlated with the IFN beta gene signature in cluster 4 (FIG. 3E). Cluster 5 showed the strongest correlations between various TE classes and IFN gene signatures, with LTR elements being most highly correlated with the IFN beta gene signature (FIG. 3F). These single cell analyses show that diverse classes of TE-derived noncoding RNAs are likely to induce IFN-related genes in different subsets of mutant KRAS-transformed cells.

### Example 6—Role of KRAB Zinc-Finger Proteins (KZNFs) in TE Silencing

[0096] Given the known roles of KRAB zinc-finger proteins (KZNFs) in TE silencing, we examined whether KZNFs were involved in TE regulation in mutant KRAS AALEs. When we examined the differential expression of KZNFs in mutant KRAS AALEs, we observed a broad and significant downregulation of repressive KRAB domain-containing zinc-finger proteins (FIG. 4A). In the mutant KRAS HA1E cells, however, no KZNFs were differentially expressed (FIG. 4B). We then analyzed KZNF chromatin immunoprecipitation sequencing (ChIP-seq) data (17) using a newly developed University of California Santa Cruz (UCSC) Repeat Browser platform. We found that several of the significantly downregulated KZNFs in mutant KRAS AALEs bind to the consensus TE sequences of THE1D (FIG. 4C), MER20) (FIG. 4D), and L1MC4a (FIG. 4E) elements, all of which are specifically and significantly upregulated in mutant KRAS AALEs (FIG. 2D). This suggests that suppression of these KZNFs via oncogenic RAS signaling leads to de-repression of TE-derived noncoding RNAs during cellular transformation. This model is supported by broad and significant downregulation of these same KNZFs in mutant KRAS-driven lung adenocarcinomas (FIG. 4F) but not in kidney cancers (FIG. 4G).

[0097] Collectively, our findings illustrate the tissue-specific impact of oncogenic RAS signaling on the noncoding transcriptome. These conclusions are based on deeply sequencing and analyzing the transcriptomes of mutant KRAS-transformed cells at both the population and single-cell levels, building on previous work identifying noncoding RNAs that are coordinately regulated with RAS signaling genes in individual cells (8). The molecular basis for the IFN response we observe in mutant KRAS AALE cells is different from TE-induced IFN responses in cancer cells treated with DNA methyltransferase inhibitors (14, 15), as we instead observe a prominent role for KZNFs in our system. Further studies will be required to test the functional consequences of upregulating hundreds of noncoding RNAs via oncogenic RAS signaling, as well as their potential utility as tissue-specific biomarkers of RAS-driven cancers.

[0098] One or more features from any embodiments described herein or in the figures may be combined with one or more features of any other embodiment described herein in the figures without departing from the scope of the disclosure.

[0099] All publications, patents and patent applications cited in this specification are herein incorporated by reference as if each individual publication or patent application were specifically and individually indicated to be incorporated by reference. Although the foregoing disclosure has been described in some detail by way of illustration and example for purposes of clarity of understanding, it will be readily apparent to those of ordinary skill in the art in light of the teachings of this disclosure that certain changes and modifications may be made thereto without departing from the spirit or scope of the appended claims.

### REFERENCES

[0100] 1. J. T. Lee, Epigenetic regulation by long noncoding RNAs. Science 338, 1435-1439 (2012).
[0101] 2. M. Kellis et al., Defining functional DNA elements in the human genome. Proc Natl Acad Sci USA 111, 6131-6138 (2014).
[0102] 3. E. S. Lander et al., Initial sequencing and analysis of the human genome. Nature 409, 860-921 (2001).
[0103] 4. K. H. Burns, Transposable elements in cancer. Nat Rev Cancer 17, 415-424 (2017).
[0104] 5. G. Bourque et al., Ten things you should know about transposable elements. Genome Biol 19, 199 (2018).
[0105] 6. E. Anastasiadou, L. S. Jacob, F. J. Slack, Non-coding RNA networks in cancer. Nat Rev Cancer 18, 5-18 (2018).
[0106] 7. J. R. Evans, F. Y. Feng, A. M. Chinnaiyan, The bright side of dark matter: lncRNAs in cancer. J Clin Invest 126, 2775-2782 (2016).
[0107] 8. D. H. Kim et al., Single-cell transcriptome analysis reveals dynamic changes in lncRNA expression during reprogramming. Cell Stem Cell 16, 88-101 (2015).
[0108] 9. B. Papke, C. J. Der, Drugging RAS: Know the enemy. Science 355, 1158-1163 (2017).
[0109] 10. A. S. Lundberg et al., Immortalization and transformation of primary human airway epithelial cells by gene transfer. Oncogene 21, 4577-4586 (2002).
[0110] 11. R. K. Powers, A. Goodspeed, H. Pielke-Lombardo, A. C. Tan, J. C. Costello, GSEA-InContext: identifying novel and common patterns in expression experiments. Bioinformatics 34, 1555-1564 (2018).
[0111] 12. E. Kim et al., Systematic Functional Interrogation of Rare Cancer Variants Identifies Oncogenic Alleles. Cancer Discov 6, 714-726 (2016).
[0112] 13. A. J. Minn, Interferons and the Immunogenic Effects of Cancer Therapy. Trends Immunol 36, 725-737 (2015).
[0113] 14. K. B. Chiappinelli et al., Inhibiting DNA Methylation Causes an Interferon Response in Cancer via dsRNA Including Endogenous Retroviruses. Cell 162, 974-986 (2015).
[0114] 15. D. Roulois et al., DNA-Demethylating Agents Target Colorectal Cancer Cells by Inducing Viral Mimicry by Endogenous Transcripts. Cell 162, 961-973 (2015).
[0115] 16. J. L. Benci et al., Opposing Functions of Interferon Coordinate Adaptive and Innate Immune Responses to Cancer Immune Checkpoint Blockade. Cell 178, 933-948 e914 (2019).
[0116] 17. M. Imbeault, P. Y. Helleboid, D. Trono, KRAB zinc-finger proteins contribute to the evolution of gene regulatory networks. Nature 543, 550-554 (2017).
[0117] 18. Bolger, A. M., Lohse, M., & Usadel, B. (2014). Trimmomatic: A flexible trimmer for Illumina Sequence Data. Bioinformatics, btu170.
[0118] 19. Andrews S. (2010). FastQC: a quality control tool for high throughput sequence data.
[0119] 20. Smit, A F A, Hubley, R & Green, P. RepeatMasker Open-4.0. 2013-2015
[0120] 21. Patro, R., Duggal, G., Love, M. I., Irizarry, R. A. & Kingsford, C. Salmon provides fast and bias-aware quantification of transcript expression. Nature Methods 14, 417 (2017).
[0121] 22. Harold J. Pimentel, Nicolas Bray, Suzette Puente, Páll Melsted and Lior Pachter, Differential analysis of RNA-Seq incorporating quantification uncertainty, Nature Methods (2017), advanced access.
[0122] 23. Love, M. I., Huber, W., Anders, S. Moderated estimation of fold change and dispersion for RNA-seq data with DESeq2 Genome Biology 15(12):550 (2014).
[0123] 24. Charlotte Soneson, Michael I. Love, Mark D. Robinson (2015): Differential analyses for RNA-seq: transcript-level estimates improve gene-level inferences.

[0124] F1000Research.
[0125] 25. Guo, C., Jeong, H.-H., Hsieh, Y.-C., Klein, H.-U., Bennett, D. A., Jager, P. L. D., Liu, Z., and Shulman, J. M. (2018). Tau Activates Transposable Elements in Alzheimer's Disease. Cell Reports 23, 2874-2880.
[0126] 26. R Core Team (2018). R: A language and environment for statistical computing. R Foundation for Statistical Computing, Vienna, Austria.
[0127] 27. Hadley Wickham (2017). tidyverse: Easily Install and Load the ‘Tidyverse’. R package version 1.2.1. 28. Sergushichev A (2016). “An algorithm for fast preranked gene set enrichment analysis using cumulative statistic calculation.” bioRxiv. doi: 10.1101/060012.
[0128] 29. Liberzon et al. 2011 Bioinformatics 27(12):1739-40.
[0129] 30. Ashburner et al. Gene ontology: tool for the unification of biology (2000) Nat Genet 25(1):25-9. Online at Nature Genetics.
[0130] 31. GO Consortium, Nucleic Acids Res., 2017.
[0131] 32. Mi et al., Nucleic Acids Res., 2017.
[0132] 33. Jennifer Bryan (2016). cellranger: Translate Spreadsheet Cell Ranges to Rows and Columns. R package version 1.1.0.
[0133] 34. Stuart and Butler et al. Comprehensive integration of single cell data. bioRxiv (2018).

1. A method for diagnosing and/or treating cancer in a subject, the method comprising:
analyzing the expression level of one or more genes in Tables 1-3 in a biological sample from the subject in conjunction with a corresponding reference level for the gene in a control sample from a control subject,
wherein a differential expression level of the one or more genes in the biological sample from the subject compared to the corresponding reference level for the gene in the control sample from the control subject indicates that the subject has cancer.

2. The method of claim 1, wherein the cancer comprises a KRAS mutation.

3. The method of claim 2, wherein the KRAS mutation is in a tissue of the subject.

4. The method of claim 3, where the tissue is lung.

5. The method of claim 1, wherein the cancer is lung cancer.

6. The method of claim 5, wherein the lung cancer is lung adenocarcinoma.

7. The method of claim 1, further comprising, prior to analyzing, measuring the expression level of the one or more genes in Tables 1-3 and the expression level of the corresponding reference level for the gene in the control sample.

8. The method of claim 1, further comprising, after analyzing, administering to the subject one or more anticancer agents.

9. The method of claim 8, wherein the anticancer agent is an inhibitor of a K-ras gene.

10. The method of claim 8, wherein the anticancer agent is an inhibitor of the gene that is identified to have the differential expression level compared to the corresponding reference level for the gene in the control sample.

11. The method of claim 1, wherein the method comprises analyzing the expression level of a gene involved in the interferon (IFN) alpha or gamma response.

12. The method of claim 11, wherein an increase in the expression level of the gene involved in the IFN alpha or gamma response relative to a corresponding reference level for the gene in the control sample from the control subject indicates that the subject has cancer.

13. The method of claim 1, wherein the method comprises analyzing the expression level of a gene encoding a pattern recognition receptor (PRR).

14. The method of claim 13, wherein an increase in the expression level of the gene encoding the PRR relative to a corresponding reference level for the gene in the control sample from the control subject indicates that the subject has cancer.

15. The method of claim 1, wherein the method comprises analyzing the expression level of a gene encoding cytosolic RNA sensor RIG-I or MDA5.

16. The method of claim 15, wherein an increase in the expression level of the gene encoding cytosolic RNA sensor RIG-I or MDA5 relative to a corresponding reference level for the gene in the control sample from the control subject indicates that the subject has cancer.

17. The method of claim 1, wherein the method comprises analyzing the expression level of a gene encoding a KRAB zinc-finger (KZNF) protein.

18. The method of claim 17, wherein a decrease in the expression level of the gene encoding the KZNF protein relative to a corresponding reference level for the gene in the control sample from the control subject indicates that the subject has cancer.

19. The method of claim 7, wherein measuring the expression level of the one or more genes comprises performing polymerase chain reaction (PCR), reverse transcriptase polymerase chain reaction (RT-PCR), single-cell RNA-sequencing, microarray analysis, a Northern blot, serial analysis of gene expression (SAGE), immunoassay, hybridization capture, cDNA sequencing, direct RNA sequencing, nanopore sequencing, and/or mass spectrometry.

20. (canceled)

21. (canceled)

22. The method of claim 1, wherein the biological sample is a blood sample, a urine sample, or a tissue sample.

23.-26. (canceled)

The application's sequence listing, which the Patent Office published only in electronic form, follows.

SEQUENCE LISTING (346 sequences)

SEQ ID NO: 1 - DNA, 582 bp, Homo Sapiens
gatttataagaaacccttagctgaatgcagggtggggagaacgaaagacaaaagcatcttttttcagaagggaaactgaaagaaagaggggaagagtattaaagaccatttctggctgggcagggcactctcagcagctcaactgcccagcgtgaccagtggccacctctgcagtgtcttccacaacctggtcttgactcgtctgctgaacaaatcctctgacctcaggccggctgtgaacgtagttcctgagagatagcaaacatgcccaacagtgagcccgcatctctgctggagctgttcaacagcatcgccacacaaggggagctcgtaaggtccctcaaagcgggaaatgcgtcaaaggatgaaattgattctgcagtaaagatgttggtgtcattaaaaatgagctacaaagctgccgcgggggaggattacaaggctgactgtcctccagggaacccagcacctaccagtaatcatggcccagatgccacagaagctgaagaggattttgtggacccatggacagtacagacaagcagtgcaaaaggcatagactacgataagctcattggtacg

SEQ ID NO: 2 - DNA, 453 bp, Homo Sapiens
agtaatgttggagtttagggctttaacatgtgtattttggggaaaacattcattacatagcagtgggtcataatttatttaactattttctgtttttgggaatttatattgttttattttcttcaaggttgcttttaagggtgacccagaagcagccctaatccaatatcttaccaatgaggaggccaggaaagccatttctagcacagaagcagttctaaacaaccgattcattcgagtcttgtggcatagggaaaataatgagcaaccgacactacagtcctcagcacagctgctcctgcaacaacagcaaacacttagtcacctctcacagcagcaccatcacctgccacagcatctacatcagcagcaggtgctagtggcccagtctgctccttcaacagtgcacggaggtatccagaagatgatgagcaaaccacagacatcaggtgc

SEQ ID NO: 3 - DNA, 1143 bp, Homo Sapiens
cacaggtgaactggatgtgtttattcaatgtgtttttggaatgcatgtgtaaataaaaatgactgtgtcatacttcccatattcatcccggaacctcctagagttcccttaggttctgccaattgtacattgaaagtacaacaggcccgtcgtggggattaattttcattgaacatttctaggaggagggaggaggaggtggggggaatgtgacagtctcaacaacagttgctatactactcttaccaaagtggttttcctatgtacttctcaacagatcggccctttcttcaaataagagcagttggaacaacaaaagctgttcagttgtacccttggaatccacggaaatcctgggtagggaagctccagtaccaccaactggaaagactgggaatgcctagtagctggtactggccattgtcgtaggctttgtccactttgacaaactgaagacggggactcgactcaccttcgccagccacaggaggacctccagacgaggaccggactcgccgcctttctttcccgtcagaaagggatcccttgcggacaagaccgaatggcccctaaggcttctctgcaggtccaaccgaaacaggcctgaagttccaggatgggcgagaggatcctctttgagcgaaaccagccttctgcctggctggccctggtcaacacactcggaagaggccgatttggaggacagaacggaagaaaagacctaaagtagatgatcctcatccaatcacttaaaggcctgaatagaaccaaaagtctgacctgcccatgagtaagagagagctccttctgcctgattgcttcagctgagatatcagccttttcctgcctttggaattgaactgcaacactggctcttcctgggcctcaagcctgccagcttttgaactgtaatcacaccatcatctctcctggttctcaggcctttggactcaaatcagaaacacaccatgggctctcctgtgtctcaagcttgccaactgtgatcttgagacttctcagcctccataatcacatgagtcaattgttggttctgtttctctggagaaccctaatccatcactttacatatttcttccattacacatattgtttcccagcatattaaataatttactgattata

SEQ ID NO: 4 - DNA, 553 bp, Homo Sapiens
atattatggtagaaaaggaaccagtgatttacttgcttgggaccccctatttggaccatctcttgattcatcttcttcatcttcactaacttcatcatcatcagccaggcccacaactcctctttctgtaggcaccattgtcccacctccgaggcctgcttccagaccaaagcttacttcaggcaaactcagtgggattaatgaaatacccaggccattcagcccacctgtaacttccaacaccagcccacctcctgctgcaccattagcccgggcagaaagttcttcttctatctcatcatctgcttcattgagtgctgccaatactccaacagtaggtgtgtcacggggtcccagccctgtcagccttggaaatcaggataccttacctgtggcagttgcccttacagaatctgttaatgcctactttaaaggagcagatcccaccaagtgtattgtgaagatcactggtgatatgacaatgtcatttccaagtggaattattaaagtcttcaccagcaatccaactccagctgtgttgtgcttcagggtg

SEQ ID NO: 5 - DNA, 557 bp, Homo Sapiens
gtatgatggtggtggtggtggtgtcttcctgtctcaacgatacctattttctagtgctgagatcctgagacaatgaatcatagtgaaagattcgttttcattgcagagtggtatgatccaaatgcttcacttcttcgacgttatgagcttttattttacccaggggatggatctgttgaaatgcatgatgtaaagaatcatcgcacctttttaaagcggaccaaatatgataacctgcacttggaagatttatttataggcaacaaagtgaatgtcttttctcgacaactggtattaattgactatggggatcaatatacagctcgccagctgggcagtaggaaagaaaaaacgctagccctaattaaaccagatgcaatatcaaaggctggagaaataattgaaataataaacaaagctggatttactataaccaaactcaaaatgatgatgctttcaaggaaagaagcattggattttcatgtagatcaccagtcaagaccctttttcaagtaggtccttaatttggggattagtggtatgtaaaggaggatatc

SEQ ID NO: 6 - DNA, 584 bp, Homo Sapiens
gacgttggacgacaaagatggcggcagggaccagcagttactgggaagatctcaggaaacaggctcgacagctggaaaatgaacttgacctgaaactagtttccttcagcaaactatgtacaagttacagtcatagcagtacccgagatggaagacgcgacagttctgatacaacaccccttttaaatggatcaagccaagacagaatgtttgagacaatggcgattgagattgaacaacttttggcaaggcttacaggggtaaatgataaaatggcagaatataccaacagtgcaggtgtcccctccttgaatgcagccctgatgcatacattacagcggcatagagacatattgcaggattatacacatgaattccataaaaccaaagcaaactttatggcaatacgggaaagggagaatcttatgggatcagtacgaaaagatattgagtaagttactttttatattattttgtagaatatttattcagatttggctttaggatatgttcacggttaattgcaaattgagtggcagaaccgtggttgagattttagggtttccaattcccatttcactgtc

SEQ ID NO: 7 - DNA, 325 bp, Homo Sapiens
gagcggggaggaggcggtggccgtggtgcgggctctgcagcgagcgctcgatggaacctcatcccaggggatggtgactttcgaggacacggctgtgtctctaacctgggaggagtgggagcgcctggacccagcacggagggacttctgcagagagagtgcgcagaaggattccgggagcacagttccgccgagtgagtgctgttgctctgctggtttattgcggtgtgtggtttgtgaagggctggttcactaccatccctgagccactatgccattcccagacttgggctgagagccttcaggtgccttctgtaacgcaagc

SEQ ID NO: 8 - DNA, 574 bp, Homo Sapiens
acttcctccgcggttcctcggagccgcctcgctcctcttcagggactttgctgagaagggctctcgggcgtccagaccccaccgcaaaggtgtttggcgatccgccgagaagttgttggccccaggagcatccctcggggccgaatgcgcagtggacgatgccccttctgacccaacagatccaagacgaggatgatcagtacagccttgtggccagccttgacaacgttaggaatctctccactatcttgaaagctattcatttccgagaacatgccacgtgtttcgcaactaaaaatggtatcaaagtaacagtggaaaatgcaaagtgtgtgcaagcaaatgcttttattcaggtatggaagtaggcgcctttaagcctgtgccatagatactctaaatgtaatttaatgaaatcggaaggtttcagtagacaaaataacttaatagtcataataacttgtcaatagtcataataaataacttaataaataaataatagtcttaagttagagaacaaaacgtcattacttgaattttttttctctcccggtaacaaattcttttcccatct

SEQ ID NO: 9 - DNA, 2501 bp, Homo Sapiens
ggtttggccgctgccggccagcgtcctctggccatggacaccccggaaaatgtccttcagatgcttgaagcccacatgcagagctacaagggcaatgaccctcttggtgaatgggaaagatacatacagtgggtagaagagaattttcctgagaataaagaatacttgataactttactagaacatttaatgaaggaatttttagataagaagaaataccacaatgacccaagattcatcagttattgtttaaaatttgctgagtacaacagtgacctccatcaattttttgagtttctgtacaaccatgggattggaaccctgtcatcccctctgtacattgcctgggcggggcatctggaagcccaaggagagctgcagcatgccagtgctgtccttcagagaggaattcaaaaccaggctgaacccagagagttcctgcaacaacaatacaggttatttcagacacgcctcactgaaacccatttgccagctcaagctagaacctcagaacctctgcataatgttcaggttttaaatcaaatgataacatcaaaatcaaatccaggaaataacatggcctgcatttctaagaatcagggttcagagctttctggagtgatatcttcagcttgtgataaagagtcaaatatggaacgaagagtgatcacgatttctaaatcagaatattctgtgcactcatctttggcatccaaagttgatgttgagcaggttgttatgtattgcaaggagaagcttattcgtggggaatcagaattttcctttgaagaattgagagcccagaaatacaatcaacggagaaagcatgagcaatgggtaaatgaagacagacattatatgaaaaggaaagaagcaaatgcttttgaagaacagctattaaaacagaaaatggatgaacttcataagaagttgcatcaggtggtggagacatcccatgaggatctgcccgcttcccaggaaaggtccgaggttaatccagcacgtatggggccaagtgtaggctcccagcaggaactgagagcgccatgtcttccagtaacctatcagcagacaccagtgaacatggaaaagaacccaagagaggcacctcctgttgttcctcctttggcaaatgctatttctgcagctttggtgtccccagccaccagccagagcattgctcctcctgttcctttgaaagcccagacagtaacagactccatgtttgcagtggccagcaaagatgctggatgtgtgaataagagtactcatgaattcaagccacagagtggagcagagatcaaagaagggtgtgaaacacataaggttgccaacacaagttcttttcacacaactccaaacacatcactgggaatggttcaggcaacgccatccaaagtgcagccatcacccaccgtgcacacaaaagaagcattaggtttcatcatgaatatgtttcaggctcctacacttcctgatatttctgatgacaaagatgaatggcaatctctagatcaaaatgaagatgcatttgaagcccagtttcaaaaaaatgtaaggtcatctggggcttggggagtcaataagatcatctcttctttgtcatctgcttttcatgtgtttgaagatggaaacaaagaaaattatggattaccacagcctaaaaataaacccacaggagccaggacctttggagaacgctctgtcagcagacttccttcaaaaccaaaggaggaagtgcctcatgctgaagagtttttggatgactcaactgtatggggtattcgctgcaacaaaaccctggcacccagtcctaagagcccaggagacttcacatctgctgcacaacttgcgtctacaccattccacaagcttccagtggagtcagtgcacattttagaagataaagaaaatgtggtagcaaaacagtgtacccaggcgactttggattcttgtgaggaaaacatggtggtgccttcaagggatggaaaattcagtccaattcaagagaaaagcccaaaacaggccttgtcgtctcacatgtattcagcatccttacttcgtctgagccagcctgctgcaggtggggtacttacctgtgaggcagagttgggcgttgaggcttgcagactcacagacactgacgctgccattgcagaagatccaccagatgctattgctgggctccaagcagaatggatgcagatgagttcacttgggactgttgatgctccaaacttcattgttgggaacccatgggatgataagctgattttcaaacttttatctgggctttctaaaccagtgagttcctatccaaatacttttgaatggcaatgtaaacttccagccatcaagcccaagactgaatttcaattgggttctaagctggtctatgtccatcaccttcttggagaaggagcctttgcccaggtgtacgaagctacccagggagatctgaatgatgctaaaaataaacagaaatttgttttaaaggtaaa

SEQ ID NO: 10 - DNA, 1636 bp, Homo Sapiens
gtgaattccagctcatcaaggtgctgtacaagaccagccataccagctgccagtggaaatcgatcctctcatagccagcaatacaggaatgcacaggaggcaaatcactgaccttttagaccaaagtattcaagtgcattcccagtgctttgtcatcacttcagacaaccgctatattctcgtctgtggcttctgggataaaagtttcagagtctattctacagacacaggaagattgatccaagtggtgtttggccattgggatgtcgtcacttgccttgctcgttctgagtcatatattgggggaaattgctacattctctcagggtcacgtgatgcaactcttttgctgtggtattggaatggaaaatgcagtgggattggagataacccaggcagtgagactgctgctcctcgggccattttgaccggccatgactatgaggtcacatgtgctgcggtgtgtgcggagctaggcctggtgttgagtggttcacaagaaggaccatgtctcatacattccatgaatggagacttgttgaggaccttggagggtcctgaaaactgcctgaaaccaaaactcattcaggcttcaagagagggtcattgtgtcatattctatgaaaacggcctcttctgtacattcagtgtgaatggaaaactccaggccacgatggaaacagatgataacataagagccatccagctgagccgagatgggcagtacctgctcacaggaggagacagaggagtggtcgtggtccggcaggtgtcggacctcaagcagctctttgcctatccaggatgtgacgctggaatccgggccatggcgctgtcttacgaccagaggtgcatcatttctggcatggcttcaggaagcattgtgctattttacaacgactttaaccggtggcatcatgaataccaaacccgctactgatggtgacagctgtacatcaactctgcccctaggatgagcagaagtacctggagcatcattctcttctaccacatctgaatgtaacttaaatttgctcaaagaagcaaaatattttttaaagttattaataattgctatttttgtagtctttgcttgacttttttgggggggattagcaaagcagaaaactggctgctgggttctgtagttttaaaaaatctatatttttagtcataatgagaagtctattttcaccaattatggaaacatacagtggagcaagtaaaccacttattccagctataatattatgaagaacatttcccatgcatctacaagcttgagaaataggattttcacagtggggaagtgggttacaatattggaataggaaaatttgatgctgtaatttgggtcctgtatttttccaaacaactgtgcttcttcagcactaatatttctgggatttaaatagtaatgtttaaattatggtaaatgtaatttaaaacatctcaattaagtctgtctatcaatattgttcttcaagcatgttttagacctagaaaagtatggtttgggggaggctattttattgtgtggttagcacaaggaatctaatttatagcaagtgtgaaatagttaccattttttcctgatctgtcatcttcatagcacaacaaaacgaaatgatggaaa

SEQ ID NO: 11 - DNA, 572 bp, Homo Sapiens
acctctcaagcagccagcgcctgcctgaatctgttctgccccctccccacccatttcaccaccaccatgacaccgggcacccagtctcctttcttcctgctgctgctcctcacagtgcttacagctaccacagcccctaaacccgcaacagttgttacgggttctggtcatgcaagctctaccccaggtggagaaaaggagacttcggctacccagagaagttcagtgcccagctctactgagaagaatgctgtgagtatgaccagcagcgtactctccagccacagccccggttcaggctcctccaccactcagggacaggatgtcactctggccccggccacggaaccagcttcaggttcagctgccacctggggacaggatgtcacctcggtcccagtcaccaggccagccctgggctccaccaccccgccagcccacgatgtcacctcagccccggacaacaagccagccccgggctccaccgcccccccagcccacggtgtcacctcggccccggacaccaggccggccccgggctccaccgccccccaagcccacggtgtcacctc

SEQ ID NO: 12 - DNA, 873 bp, Homo Sapiens
gcaggttgcaacttgtgtgcgacttttaggtcgtaattctaactccaagaggctcttgggttatgtggcaactctgaaggataattttggatttattgaaacagccaatcatgataaggaaatctttttccattacagtgagttctctggtgatgttgatagcctggaactgggggacatggtcgagtatagcttgtccaaaggcaaaggcaacaaagtcagtgcagaaaaagtgaacaaaacacactcagtgaatggcattactgaggaagctgatcccaccatttactctggcaaagtaattcgccccctgaggagtgttgatccaacacagactgagtaccaaggaatgattgagattgtggaggagggcgatatgaaaggtgaggtctatccatttggcatcgttgggatggccaacaaaggggattgcctgcagaaaggggagagcgtcaagttccaattgtgtgtcctgggccaaaatgcacaaactatggcttacaacatcacacccctgcgcagggccacagtggaatgtgtgaaagatcaggtaagtgccagcatctctgtatctgaatttgatccttctatgagttggtaaccaaaaccttcaaatattttcagccaaggggaaatcatcaacattcattcgtttttttatttctacttcaccttttttcagtcatttgaggtagcttaataaaaacagaaaactacacaaaaagtgactatattagcaatgagaaagtaagattggtattagtaactaatattatgcaatggggaaaataagttaggggtgagatttccagaatagaaggactatatggttttgtacacttttgcttagagcttcttttgcatatcacacaa

SEQ ID NO: 13 - DNA, 856 bp, Homo Sapiens
tgatcatcatgcctcactgccattccctgcctagggttcctgggggggccgaaggcatgcgatgccttctgtgaggtccatcttttgtttctttcaccagaggctcctttctcaccaagaagcaggaccaggcagcccggaagatcatgagattcctgcggcgctgccgacacaggatgagggaactgaagcagaaccaggagctggaagggcttccccagccgggactggccacatgacctggccaccgcctttctcaccaccctgggggcgcctcgtgcagtcttaacagggagagggctttctggggcagggggagcccctgtcggcagctttcctgttcacctttgttggagccctctgtaggcctcctccctcctccccacgccttgctcccacacccctctcctcgtccctcctggtcgtgccccgtctcttttggtcctggctccagaaaacccgcgccccacatacctgcatcttccgctgtgacctccggagccctgcctgcccctgctccccagctcctcctgcctgcacccgactcggccccctcctgacttgccttatttatttgttcgacgcgtctctgaatgtatccgcctcggttcccaccactgccttcgctgcgcacgcccctcgtgtttcagggctgaccgtgtccccacccgactccgcatgtttgcgtctgtttcctccctctctggccctgtcttaccccatcacccgactctggccactgacctcagggccgaaggggaggtggtgtacataggaacgcgttgcggagtccgccccgtcccccgaggggaggggtcttgtacatactgtaacatacagagtatagtgaagaatc

SEQ ID NO: 14 - DNA, 619 bp, Homo Sapiens
ggggaaggaaagaaggcgccgcagctaagcccaggtctctcctccgcaggttccagctcctttcctggagcgtgtgtgggggcaacaaggacccatgggttcaggaattgatgagctgtcttgatctcaaagaatgtggacatgcttactcggggattgtggcccaccagaagcatttacttcctaccagccccccaatttctcaggcctcagagggggcatcttcagatatccacacccctgcccagatgctcctgtccaccttgcagtccactcagcgccccaccctcccagtaggatcactgtcctcggacaaagagctcactcgtcccaatgaaaccaccattcacactgcgggccacagtctggcagctgggcctgaggctggggagaaccagaagcagccggaaaaaaatgctggtcccacagccaggacatcagccacagtgccagtcctgtgcctcctggccatcatcttcatcctcaccgcagccctttcctatgtgctgtgcaagaggaggagggggcagtcaccgcagtcctctccagatctgccggttcattatatacctgtggcacctgactctaatacctgagccaagaatggaagcttgtgagg

SEQ ID NO: 15 - DNA, 3473 bp, Homo Sapiens
gttttcgagacagggtctcgcattatcgcccaggctggagtgcgatcgcggctcactgcagcctctgcctcccaggttgaagggatcctcctgcctcagcctcccgagtagctgggactataggctcaccccactgcgccctgctaatttttgtattttttgtagagatagggtttcaccatgtcgcccaggctggtctcgaactcctggcctcaagtgatccgcccaccttggcctctgaaagtgctgggatcacaggcgtgagccactgcgcccagcctttaccatgttttaaggagactttttttttttgagacggagtttttttttgctctgttgcccaggctggagtgcagtggcgcgatctcggttcactgcaacctccgcctcctgggttcaagcaattctcctgcctcagcctccccagtagctgggattacaggcgcctgccacccagcccggctaatttttgtatttttactagagacgggggtctcaccatgttggccaagctggtctcgaactcctgacctcaaatgagccacccgcctcggcctcccaaagtgctgggattacaggtgtgagccacggagcccagcctctaccgtgttttaagacttttttgattaagagatgggagatcacaggaaagggaaagcctttttcactttccaaacgttcatcatcctctctccccactgcccccaaatcctaaggctgtgtatttatttagtagtagtggtggtacctttatggaactgatgacttagactccaggctgaaacaggaagaggtagaaaggtgccccccccaagtggtgaccccctaagtggtggcccagctgccttgagacactttatacctaccccacaccttgcaactcttcattacttgacttcccaccacccgcccacagatgcttatttgctggaccagagggaacagaggtgggtaaaaagggcatggagtactctgtgtctcccttcctgcctccacggtccagcttcccctctgaacacagggggatggtctacagttgtggcttcccggcatgaacgtgcagcaggctcccctgggggctttcctgcggagcttgccacacgcaggccttggctcagataccaccctccccctcggatatttgagatagactttggctggaggatcacatgaaccccggagttcaaggctgcagtgagctgtgatcaagctactgcactccagcttggatggcagagtgagaccctgtctccagagaaaaaaacaagaaagagattggaggtagaccccactggtgaacatgagcctgggtggtagcccagctctgcccccagaggtccctggggttagaggagtgagagtgaacaagtcaagttgaaacagttgttccatgtctgtgggagtggggtgtataccctggggctgtctggtgtccccttgggactggagtgagaaaagaggggtctgtccagtatgggacagagactagaagattcctcctacacaacctcgcagcaaagggtgggactcctgcttggggaccgtgctggccaggggcttaaacctgggctgctgtccagtgcctccctttcccctaccgcccccttccatctctagttcctcttcccgatgttctagcgtcatttcagaagactcctctggaaaacacccttgggggcagggcctgggcctgggggtgccaggtctagaagccttttccgtctgctgcccgcagctctccctgtccagccgcctgcagctgaccctgtaccagtacaagacgtgtcccttctgcagcaaggtccgagccttcctcgacttccatgccctgccctaccaggtggtggaggtgaaccctgtgcgcagggctgagatcaagttctcctcctacagaaaggtgcccatcctggtggcccaggaaggagaaagctcgcaacaactaaatgactcctctgtcatcatcagcgccctcaagacctacctggtgtcggggcagcccctggaagagatcatcacctactacccagccatgaaggctgtgaacgagcagggcaaggaggtgaccgagttcggcaataagtactggctcatgctcaacgagaaggaggcccagcaagtgtatggtgggaaggaggccaggacggaggagatgaagtggcggcagtgggcggacgactggctggtgcacctgatctcccccaatgtgtaccgcacgcccaccgaggctctggcgtcctttgactacattgtccgcgagggcaagttcggagccgtggagggtgccgtggccaagtacatgggtgcagcggccatgtacctcatcagcaagcgactcaagagcaggcaagtgtgtgtgcacatccggggcctgctgtccccgagcctccggtgccacgagcagtggtgatcccatcacacccctcaggagaccagcgggaggccgaggcctagggcaggtgggaaacgcattatggattatgggtcccttggccaagatgggacttggacccagagctcctgctcacctcccctggggacagcagggctggccttgaagccggaagcctgggccctgactggcgcctcctctgtggctttctccctggcctggtctcttgcctttaccacagcctccccgtctgggacggatgctccctgaggcgtctgcagatgtgatgctctcacctggggtgccgtcctggcttccacacctcccccctctccccagaggagaccctcttccctgctgggctgggagtgggggctcccctgaggggcttttcccttccccgcccaggcaccgcctccaggacaacgtgcgcgaggacctctatgaggctgctgacaagtgggtggctgctgtgggcaaggaccggcccttcatggggggccagaagccgaatctcgctgatttggcggtgtatggcgtgctgcgtgtgatggaggggctggatgcgttcgatgacctgatgcagcacacgcacatccagccctggtacctgcgggtggagagggccatcaccgaggcctccccagcgcactgaatgtccccgcgcagagcagagggaaggcagcggaagacgccagctgccagggcctggggccactgggccagcgcctggcgatactggttgggggcaggatcattctgccccttgtccacgcacccccaccagccctctcgcttctaacacagggcacctgctggggctcagggatgttagggacgagttccagccctgccactgccctggggcgacccctccctgtccctgcctccctgctctgccgcccctcttcctggaccctcagtggctgtcccatggctacatcctgtgggtgggggccctcgacaggacagcaggacggtttgttttcagtggaatcccatccctgggttcccctggttcccactcttcccaagcctcccgggactgggacatgtttgcaataaaggaaaggtttgtggcgcc

SEQ ID NO: 16 - DNA, 584 bp, Homo Sapiens
ctcaccggcgtctgtcctgccgcccagctacaggcctcgggcctccccggcagcgcggagctgacggtgggcgcggcggtcgcctgcttcctggcgctggagggcgccgacgtgagctacaccaaccaccgcggtcggagcccgctggacctggccgccgagggtcgcgtgctcaaggcccttcagggctgcgcccagcgcttccgagtgcgcgcgcaggatgaagaagtgcatcaggtgccaggtggtcgtcagcaagaaactgcgcccagacggctctgaggtggcgagcgccgcccccgcccccggcccgccgcgccagctggtggaggagctgcagagccgctaccggcagatggaggaacgcatcacctgccccatctgcatcgacagccacatccgcctcgtgttccagtgcggccacggcgcatgcgccccctgcggctccgcgctcagcgcctgccccatctgccgccagcccatccgcgaccgcatccagatcttcgtgtgagccgcgccgtccgccgcgcccgagctgccttcgcgtgcccccgccctgtgttttataaaaagaaagattctcg

SEQ ID NO: 17 - DNA, 3326 bp, Homo Sapiens
acagtttccagccgccgctctcctcagtgcccggtggcccaggagggcctgggagcccgaagccgtccccgagtcgctcctaggtcactggcgcgatgcgggccgtcctctcggctgatgggttggaagcccagcgaggctagaggccagtcccaaagtttccaggcatcagggctgcagcccaggagcctcaaggcggcccggcgggcgactggacggccggacaggtcccgagcagcccggcccaccatggacccctctgcccacaggtcccgagcagccccgcccaacatggacccagacccccaggcgggcgtgcaggtgggcatgcgggtggtgcgcggcgtggactggaagtggggccagcaggacggcggcgagggcggcgtgggcacggtggtggagcttggccgccacggcagcccctcgacacccgaccgcacagtggtcgtgcagtgggaccagggcacgcgcaccaactaccgcgccggctaccagggcgcgcacgacctgctgctgtacgacaacgcccagatcggcgtccggcaccccaacatcatctgtgactgctgcaagaagcacgggctgcgggggatgcgctggaagtgccgtgtgtgcctggactacgacctctgcacgcagtgctacatgcacaacaagcatgagctcgcccacgccttcgaccgctacgagaccgctcactcgcgccctgtcacactgagtccccgccagggcctcccgaggatcccactaaggggcatcttccagggagcgaaggtggtgcgaggccccgactgggagtggggctcacaggatggaggggaagggaaaccgggccgtgtggtggacatccgtggctgggatgtggagacaggccggagtgtggccagcgtgacgtgggctgatggtaccaccaatgtgtaccgtgtgggccacaagggcaaggtggacctcaagtgtgtgggcgaggcagcgggcggcttctactacaaggaccacctcccaaggctcggcaagccggcggagctgcagcgcagggtgagtgctgacagccagcccttccagcacggggacaaggtcaagtgtctgctggacactgatgtcctgcgggagatgcaggaaggccacggcggctggaaccccaggatggcggagtttatcggacagacgggcaccgtgcatcgtatcacggaccgcggggacgtgcgcgtgcagttcaaccacgagacgcgctggaccttccaccccggggcgctcaccaagcaccactccttctgggtgggcgacgtggtccgggtcatcggcgaccttgacacagtgaagcggctgcaggctgggcatggcgagtggacggacgacatggcccctgccctgggccgcgtcgggaaggtggtgaaagtgtttggagacgggaacctgcgtgtagcagtcgctggtcagcggtggaccttcagcccctcctgcctggtggcctaccggcccgaggaggatgccaacctggacgtggccgagcgcgcccgggagaacaaaagctcactgagcgtggccctggacaagcttcgggcccagaagagtgacccagagcacccgggaaggctggtggtggaggtggcgctgggtaacgcagcccgggctctggacctgctgcggaggcgcccagagcaggtggacaccaagaaccaaggcaggaccgctctgcaagtggctgcctacctgggccaggtggagttgatacggctgctgctacaagccagggcgggcgtggacctgccggacgacgagggcaacacggcactgcactacgcggccctggggaaccagcccgaggccaccagggtgctcctgagtgctgggtgccgggcggacgccatcaacagcacccagagcacagcactgcacgtggccgtgcagaggggcttcctggaggtggtgcgggccctgtgtgagcgcggctgtgacgtcaacctgcccgacgcccactcggacacgcccctgcactccgccatctcggcgggcactggagccagcggcattgtcgaggtcctcacggaggtgccaaacatcgatgttaccgccaccaacagccagggtttcaccctgctgcaccatgcctccctcaagggtcacgcgctgtgagtgtggggtgggcacacagctgcagccggcctcttgctgtgctgcctgggggcagtcccaggtcccagaccaacctccctgctccacagagctgtgagaaagattctggctcgggcgcggcagctggtggacgccaagaaggaggacggcttcacggcgctgcatctggctgccctcaacaaccaccgcgaggtggcccagatcctcatccgggagggccgctgtgacgtgaacgtgcgcaaccggaagctgcagtccccgctgcatctcgccgtgcaacaggcccacgtggggctggtgccgctactggtggacgctgggtgcagtgtcaacgccgaggacgaggagggggacacagccctgcacgtggcgctgcagcgtcatcagctgctgcccctggtggctgatggggccgggggggacccagggcccttgcagctgctgtccaggctacaggcctcgggcctccccggcagcgcggagctgacggtgggcgcggcggtcgcctgcttcctggcgctggagggcgccgacgtgagctacaccaaccaccgcggtcggagcccgctggacctggccgccgagggtcgcgtgctcaaggcccttcagggctgcgcccagcgcttccgggagcggcaggcgggcgggggcgcggccccgggccccaggcaaacgctcgggacccccaacaccgtgacgaacctgcacgtgggcgccgcgccggggcccgaggccgctgagtgcctggtgtgctccgagctggcgctgctggtgctgttctcgccgtgccagcaccgcaccgtgtgtgaggagtgcgcgcgcaggatgaagaagtgcatcaggtgccaggtggtcgtcagcaagaaactgcgcccagacggctctgaggtggcgagcgccgcccccgcccccggcccgccgcgccagctggtggaggagctgcagagccgctaccggcagatggaggaacgcatcacctgccccatctgcatcgacagccacatccgcctcgtgttccagtgcggccacggcgcatgcgccccctgcggctccgcgctcagcgcctgccccatctgccgccagcccatccgcgaccgcatccagatcttcgtgtgagccgcgccgtccgccgcgcccgagctgccttcgcgtgcccccgccctgtgttttataaaaagaaagattctcgg

SEQ ID NO: 18 - DNA, 1029 bp, Homo Sapiens
ctgcttgggggcgcctgccacccctggctgtttatcgaggaggctgcaggccgggaggtcgagagagactttgcctccgtgtattcccgtctggtgctctgtaagaccttcaggttggatgaagatggcaaagtcctgaccccggaggagctgctctaccgggctgtgcagtctgtgaacgtgacccacgatgcagtgcatgcacaaatggatgtgaagctccgctcactgatctgcgtggggctcaagtgagtgtggaaaaggggttggaggagagccctggagtggggggacccagcccagcatcagggggggtccttacagggaaccctaaaggacaaagaacctcaggggctcaggtccttccccaaagagggtggtctgggagctgctgagagacaggtcagaggcttccaccgtggctgcagccagaagggcctggagctgcccctgctccccactcctggccatgtccccagtgagcaggtgctgcacctgtggctggaggtgctctgctccagcctgcccaccgtggagaagtggtaccagccctggtccttcctgcgcagcccgggctgggtccagatcaagtgtgagctccgagtcctctgctgctttgccttcagcctctcccaggactgggagctccctgcgaagagagaggcgcagcagcccctgaaggagggcgtccgggacatgctggtgaagcaccacctcttcagctgggatgtggacgggtgaccccctcctccccagcccaacctcgggcctgcgtctgaggtggcccaggaccccaagctgcagagcccagggaagagcagctccagagccctggccggggccgcgggatatcaatatcaggctgccccactccacgttccccagcacatcccaggtggtgggagcagagggtaccctgccccaccagggtccttagggatgctctaggccaaaccacagtttgtaccaaaaaccttgtgaggaggtgggggagccatgtctgtgctcaggaagagggaaggggatggg

SEQ ID NO: 19 - DNA, 590 bp, Homo Sapiens
aggcattagtatatggttgggccctgacgctaccaccattcttctccgtcccccctcccccaagctggcgcctactatccagcccaaggggtgcagcagtttcccactggcgtggcccccaccccagttttgatgaaccagccaccccagattgctcccaagagggagcgtaagacgatccgaattcgagatccaaaccaaggaggaaaggatatcacagaggagatcatgtctggggcccgcactgcctccacacccacccctccccagacgggaggcggtctggagcctcaagctaatggggagacgccccaggttgctgtcattgtccggccagatgaccggtcacagggagcaatcattgctgaccggccagggctgcctggcccagagcatagcccttcagaatcccagccttcgtcgccttctccgaccccatcaccatccccagtcttggaaccggggtctgagcctaatctcgcagtcctctctattcctggggacactatgacaactatacaaatgtctgtagaagaatcaacccccatctcccgtgaaactggggagccatatcgcctctctccagaacc

SEQ ID NO: 20 - DNA, 1069 bp, Homo Sapiens
tgaccactctgctctctctggcaggtcatgatgatgggcagcgcccgcgtggcggagctgctgctgctccacggcgcggagcccaactgcgcagaccctgccactctcacccgaccggtgcatgatgctgcccgggagggcttcctggacacgctggtggtgctgcaccgggccggggcgcggctggacgtgcgcgatgcctggggtcgtctgcccgtggacttggccgaggagcggggccaccgcgacgttgcagggtacctgcgcacagccacgggggactgacgccaggttccccagccgcccacaacgactttattttcttacccaatttcccacccccacccacctaattcgatgaaggctgccaacggggagcggcggaaagcctgtaagcctgcaagcctgtctgagactcacaggaaggaggagccgaccgggaataaccttccatacatttttttctttgtcttatctggccctcgacactcaccatgaagcgaaacacagagaagcggatttccagggatatttaggagtgtgtgacattccaggggtcgtttgcttttcagggttttctgagggaaagtgcatatgaaatccttgactggacctggtggctacgaatcttccgatggatgaatctcccactccagcgctgagtgggagaaggcagtgattagcacttgggtgacggcagtcgatgcgttcactccaatgtctgctgaggagttatggtgaacccacaacttaggccctagcggcagaaaggaaaacctgaagactgaggacaaagtggaggagggccgaggtgggcttcagtaagtccccggcggcgctttagtttgagcgcatggcaagtcacatgcgtaaacgacactctctggaagccctggagaccctcgcccaactccaccagatagcagaggggtaagagaggatgtgcaagcgacgacagatgctaaaatccctggatcacgacgctgcagagcacctttgcacaggatgctggcctttgctcttactacactgaggagagattcccgcgggttccgcaggcagactacac

SEQ ID NO: 21 - DNA, 2952 bp, Homo Sapiens
tacaaacaggccgtccatgagcttgtgcgttgcgtagcactgacaagaatttgctatggagactcacattggaaactagcagaggcacatgttaatctggctcaaggctacctccagctgaaaggactgtcactgcaagcaaaacaacatgcagaaaaagccagacaaatcctcgccaactccattgtgcctccctatagtgagaatacagatgttttcaagttttccattgagcttttccataccatgggcagagctttactctcccttcaaaagtatccttttgcctctaacttttacaaatagaaatactattcacgtaacacttacacgccaagtaaaaagctgatgctgatggatgacttaggaagtgtgattggaagtatgggagccaaggaagttcaggacatggggtgtagaatctagaaccaagtggaaaatttcctgaacacaattcagatttaaggaagctgcagagaatttgacaaaagcagagagactttcaaaggagctgctacaatgtggaagaattataaaggaagaatggatagaaattgaagcacggatcagattatcatttgcacaggtgtatcaaggtcagaagaagtcaaaagaagctttgtcccactatcaagcagctttggaatatgttgagatcagtaaaggtgaaacaagtcgtgagtgtgtacccatattgagagaattagcaggtgtagagcaagccctgggactccacgatgtatccatcaaccacttcctccaggcacatcttatcatcctgagtagaagcccctctcaagtggaggcagcagactcggcacacatcgtcgcccatgctgctgtcgcttcagggagacacgagcaccatgatgtagctgagcagtattttcaagagagcatggctcatcttaaggattctgaagggatgggaagaaccaaatttctttcaattcaagatgaattttgccattttctacaaatgactggacaaaaagagagagcaacctcgatcctgagagagtccctggaagccaaagtggaagcatttggcgatttcagtcccgaggtggcagagacataccggctcctgggaggagcagacctggcgcaggggaaccacagtggggcccgcaagaaactgaagaagtgtctccagatccagaccctcttatatggaccgcaggacaaaaggactctggccacccagcaggccatgggcatgctgtccacggcccccaaggttgcttcgaagccaaggcaggcatcaaaagccaaagtggccttctgcaccagcatccctcaggacaccctgctggggaaggcccggcccggcacaacagcagactgaggcccccaccctgaaaaagcctaggacattcctgggcactgtcatttagggtgctgtacaaatcacctccgcctagaaaatggaattcaacagtcaggatacagatttccaaggccaactgttggccccaacatgcaacagtgagaccataagcctcccgtgggccacattttgacagtggatgcccttcagggtgatatatgctataaagcagttttctatcacctaagtggtttttcttgccaacaagaatttttacccatcagcactactgtggctgaaaaacttctcttcaacagttcagtgcgccctgtgcaggagtcagcccggcatctgcttgtacacacagctccttgcataggtgtggagttagatctggacagtgaacttcaggaagtcctttcttataggaggctaatagggattgagaataacatgagaagaaaacgctaataaagggaaacctgaacacgctgctgtcagcatgtgttttcaaagtgcagcctgcctcagagttcttcggagcctgaaaaggggtttgagaaagagcccagtaggaggggcaggaggccgacacacctgacttggcctggggcccaggaggcaggtgtaagggagtgaaaagaaaggctagccggaggctgcggggggaagaccgcagactccctgctgcttcgcatccctcctgtggcctccactgcaggcaggacaaacctggatgccacctggagctgcttcctgagttggcacactatcgtgtacacagcagtcttcagccccctggaaggaggccatagtcgtgtgaggatggcaaagtcgaacaggaagctttgagtgccttcctccacgatgtcaacgaggagatccagtgccagatcgaggtggatggaacacccaggggtaggggtgcaggtgtgggcagtgatgtcccttcccctccctcccctggtcccacagactgtggccatgaggctgcaggctggtgctatgacagcagattgcagcacagggccctcccctccagcccccagtgggacatcaaaaccaccctggggccatttgtgcagggcaccacctccagtattgatggggaaaataaactcagtagagccacgacagggtggagagaagcagggaccattgtcttcctcaggagcgtgacagctgaccccacagaccatgcttgctggtacacactggtcccagacccaggcctgtcggacatcagcagtgtgctaaaaacgtgtaagatgtcactactcaccgtgtgtcctatctagttgacatgggtggagtcagctaaggggtgaatgttcatatgctcccaattcacgttgaagccctaatccccaaagggatggtattgggggtggggtcttggagaggtgattaggttatgagggtggagccctgatgaatgggattagtgctttataaggagagacaccagagagatgatctctctctccaccatgtgaggacacagtgagaagacagccgtctgcaggcccggaagagagccctcaccaggaaatgaaactgttggcaccttgagacttcccagcttccagaactgtaagaaataaatgtttgttgtttaagcc

SEQ ID NO: 22 - DNA, 1956 bp, Homo Sapiens
gtggccaggcaggcaggtggacgagtccaggcagcggctgagtcagtgtgtgtggaatgttctggccgctcccagctgcaccctgcccctacctgccaccacctcaccttcatcctcaggcgctgcggccctgagcccctgccaggaatgcacctttagcccaggcctgctcagtgagctccgccgacagccagccctgctcctcccgccatgaccctgcagacccctctgggcttccaagttcctgggggctgcagtgaacatgctccacctgcatggctggcaaaccatggtgggccccagctgtgcagggtagaaagatggggcacccaccagtctctcccagtgccccggccccagctggcaccacagctatacctgggcttattccagaccttgtcgccgggaccccctggccccgctgggctctcattgccggcgcccttgccgcgggcgtcctcctcgtctcctgcctcctctgtgctgcctgctgctgctgccgccgccacaggaagaagcccagggacaaggagtccgtgggtctgggcagtgcccgcggcaccaccaccacccacctggtgcaacctgatgtggatggcctggagtccagcccgggggatgctcagcaatgggggtgcctgcagctctccctggagttcgactttggaagccaggaggtgaagggccccgctgcgcaggaccagcggttctgcgagtttccggaaagggtgacgggggaagggcagaccccatgccctgggtggtggggagctgacagggcaggggcccttggctgagcccaccccgctggctcccagatcagggtgggcctgaggcaggcagccgacctgaggcctgggggcaccgtggacccctatgcccgggtcagcgtctccacccaggccggacacagacatgagacaaaagtgcaccgaggcacgctctgccccgtgtttgacgagacctgctgcttccacgtgagtcagggatggtcggctgggtgggcctggacggctggatgggcctgggctgggtgggcctgggcagctgggtgggcctgggcagctgggtgggcctgagctagggcagcagggcctggctcacgccgctgcctcagatcccgcaggcggagctgccaggggccaccctgcaggtgcagcttttcaacttcaagcgcttctcggggcatgagcccctgggtgagctccgtctgccactgggcaccgtggatctgcagcatgttctggagcactggtacctgctgggcccgccggctgccactcagcccgagcaggtcggggagctgtgcttctctctccggtacgtgcccagctcaggccggctgaccgtggtggtgctggaggctcgaggcctgcgtccaggacttgcagagccctacgtgaaggtccagctcatgctgaaccagaggaagtggaagaagagaaagacagccaccaaaaagggcacggcggccccctacttcaatgaggccttcaccttcctggtgcccttcagccaggtccaggtgggccaccgggaggcaggggcagagcgagacccagtgccagaccacgatgactgtggtctttctcccccaactccaacctctggcctgtctctgcacagaatgtggacctggtgctggctgtctgggaccgcagcctgccgctccgaactgagcccgtaggcaaggtgcacctgggtgcccgggcctcggggcagcccctgcagcactgggcagacatgctggcccacgcccggcggcccattgcccagcggcaccccctgcggccagccagggaggtggaccgcatgctggccctgcagccccgccttcgcctgcgcctgcccttgccccactcctgaatgcaccacatgcctctgtctccccgctgagcccaggcacttgcccaggccgccctgcaggaccactgcaataaacgccttctcctgcca

SEQ ID NO: 23 - DNA, 2656 bp, Homo Sapiens
gggatcagaaaactcgctggttaatgagtggccaagaacatatcagcttaagtttgggaaaaacacacaacagggcattgtgtcagagggtgaccaaagtgactccccagcagatggaccagggaacgaacaggtgacctttgaactgaggccggagtggaagcagcgagggtgtgaagggccgggtgagggtcaaaggcagaagcaagcaggtggggagggttagcgtcatgcctgctaaggagcagtggacgggtcctagcacgtgctgtgagccacccgctgtccagggagcggttacctctgtcttgccagcttcgtggggacagatagttcagctcatcatttatgagacagagaatgggaatttggagggtctgtggctggcctcgtcctgggtgcgcagggggtcacctgaggtgtggtctgaggcctccggggaagggcatttctttgcaggacgcagtttccaggctcaagaacgtggagggaattcctaagggtcgctcttcaccaagagcgcagagccctggtagacctcagcatcgtcacagagaaagctgtgggtgcagaggccttggggacaaggcggggacggaatttcgtatttcagatgaccaaggccaatggccaagtgtgagttcttcaacgcgggcgggagcgtgaaggaccgcatcagcctgcggatgattgaggatgctgagcgcgacgggacgctgaagcccggggacacgattatcgagccgacatccgggaacaccgggatcgggctggccctggctgcggcagtgaggggctatcgctgcatcatcgtgatgccagagaagatgagctccgagaaggtggacgtgctgcgggcactgggggctgagattgtgaggacgcccaccaatgccaggttcgactccccggagtcacacgtgggggtggcctggcggctgaagaacgaaatccccaattctcacatcctagaccagtaccgcaacgccagcaaccccctggctcactacgacaccaccgctgatgagatcctgcagcagtgtgatgggaagctggacatgctggtggcttcagtgggcacgggcggcaccatcacgggcattgccaggaagctgaaggagaagtgtcctggatgcaggatcattggggtggatcccgaagggtccatcctcgcagagccggaggagctgaaccagacggagcagacaacctacgaggtggaagggatcggctacgacttcatccccacggtgctggacaggacggtggtggacaagtggttcaagagcaacgatgaggaggcgttcacctttgcccgcatgctgatcgcgcaagaggggctgctgtgcggtggcagtgctggcagcacggtggcggtggccgtgaaggccgcgcaggagctgcaggagggccagcgctgcgtggtcattctgcccgactcagtgcggaactacatgaccaagttcctgagcgacaggtggatgctgcagaagggctttctgaaggaggaggacctcacggagaagaagccctggtggtggcacctccgtgttcaggagctgggcctgtcagccccgctgaccgtgctcccgaccatcacctgtgggcacaccatcgagatcctccgggagaagggcttcgaccaggcgcccgtggtggatgaggcgggggtaatcctgggaatggtgacgcttgggaacatgctctcgtccctgcttgccgggaaggtgcagccgtcagaccaagttggcaaagtcatctacaagcagttcaaacagatccgcctcacggacacgctgggcaggctctcgcacatcctggagatggaccacttcgccctggtggtgcacgagcagatccagtaccacagcaccgggaagtccagtcagcggcagatggtgttcggggtggtcaccgccattgacttgctgaacttcgtggccgcccaggagcgggaccagaagtgaagtccggagcgctgggcggtgcggagcgggcccgccacccttgcccacttctccttcgctttcctgagccctaaacacacgcgtgattggtaactgcctggcctggcaccgttatccctgcacacggcacagagcatccgtctcccctcgttaacacatggcttcctaaatggccctgtttacggcctatgagatgaaatatgtgattttctctaatgtaacttcctcttaggatgtttcaccaaggaaatattgagagagaagtcggccaggtaggatgaacacaggcaatgactgcgcagagtggattaaaggcaaaagagagaagagtccaggaaggggcggggagaagcctgggtggctcagcatcctccacgggctgcgccgtctgctcggggctgagctggcgggagcagtttgcgtgtttgggttttttaattgagatgaaattcaaataacctaaaaatcaatcacttgaaagtgaacaatcagcggcatttagtacatccagaaagttgtgtaggcaccacctctgtcacgttctggaacattctgtcatcaccccgtgaagcaatcatttcccctcccgtcttcctcctcccctggcaactgctgatcgactttgtgtctctgttgtctaaaataggttttccctgttctggacatttcatataaatggaatcacacaa

SEQ ID NO: 24 - DNA, 1827 bp, Homo Sapiens
agaatcgaaactgagagctcctgggcaggctcggcagggcaggcagctccaggagggcttcgaaccgtggccaacagttccagtggactgcgtggacccgtgagctcaggagcctcagacgcctccctggagagccaagctggtgttcgaggtggcgcctccagggtccaccctgctgcccaacagccccgcggccaccagagggccgtccctggcccggctgtgtgccctggtggacctgtgtctgggctgctcccgctgcacccagcggctcaatgaaagcacctacgtcctccgtagggtggagcatgactgctcccgcgagatcctgctggcccgctttaagcaggccaccaagagcaaggtctggcgcgtggtgggctgccggcccaccttcccaaggcccctgtgctaccaagtctgccactactacagccctgggctcggctgccggcgccaccgaaaccggtgcacctttgcccgcagtcgcgaggaggccctggtctggaccttcgagcgtcagcacaacctccagcgcctatggctgaaggcggaggtgcagggcagcggggcccagggaggggcaggccgggcggccgacgccatccttacggagtttggcggccgcttcgagctgctttgctccctctgcttcaggcgctgtcccccatgcatctgtcgcgtggacccccaggggcagtgccctgagcacggagcctgcccctccctcctggcccacgtgagcgccgagggccgccgcaagcaacagtttgtggtggtgaggccgcggccccgggccggccagcctcctgcctactgcaggtttgtggggcgtgggcagccgtgctggcgtggggagtcccgctgccagtttgcacacagcgccgtggagatggctgtgtgggaggccgagcagctgggtggcctccagcggggggacctgctcacaccccctgcccctgatggcgacgggcgcacggccccccttggccagccccctggggcccagctgtactgcccggcctgcttggtcacctgccactctcaggaggccttcgagaaccactgcgcatcctcggagcacgcacagatggtggccttcgaccaggccctgccctgggagcaccgttccccacccccgggactctccaagttcgagctctgcccaaagcctgacctctgtgagtatggggacgcctgcaccaaggcacactcagcacaggagctgcaggagtgggtccggcgcacgcaggctgtggagctgcgggggcaggcggcctggcaggacgggctggtgccctaccaggagcggctgctggccgagtaccagcgcagcagcagtgaggtccttgtgctggcagagacccttgatggagtgcgtgtcacctgcaaccagcccctgatgtaccaggcccaggagaggaagacccagtacagctggacgtttgccgtccactctgaggtgagcggagaacagctccgactgggcggagggagccctggggaagtggtgacttcagcccgggcagacgtcaacagcctgggtcatggagctaataccgaggcactgccgctcagcacctgcgtgacctgcagcaggtcccttagcctctctgcctcagtctcctcacctagagacagggggccaggacagtcccaccttggcagggttattctatggagtatatgggttaaaacaaggatttggccaggtgcggtggttcacgcctgtaatcccagcactttgggagaccgaggcaggtggatcacctgaggtcgggagttcgagatcagcctggccaatagggtgaaactccgtctctactg

SEQ ID NO: 25 - DNA, 657 bp, Homo Sapiens
acattcaaaccatagcaggtgcaaaataagagaccttagttttaagacaggttatcctgtgatacagaagaatttagttattacctaatatttaaaacttctaagccaagcattctgtttggtaaagatttctcttaactgttagatatggcagagtgtgtaactaattttagtattgtctttgcagtgtatgctgatggtagcatatgtttagatatccttcagaatcgatggagtccaacatatgatgtatcttctatcttaacatcaattcagtctctgctggatgaaccgaatcctaacagtccagccaatagccaggcagcacagctttatcaggaaaacaaacgagaatatgagaaaagagtttcggccattgttgaacaaagctggaatgattcataatagacaactggtctgttaatctttttcatcattgttgtgtataatttacctctcattagaaaggctaacaaattttaagtgccacaggttttaaggattctgcagaaaaaaaagaaaaaagtccttcagtttagaacctacaaaagcttgtgtatcttgattaatgtactttttattgcatggtgtgaactaagttattgctgcataaatttgtaatatatcctgtttgtatttttttccaagtgtataatg

SEQ ID NO: 26 - DNA, 1039 bp, Homo Sapiens
ccgttgttatcgagcattggtgaggggcctggagagtaacgggagagagggaacagtggcgccggggggggccaggggccccggtttctaacctctccgtctctccctagcactagctgacgcgtctatgggcgcaacgccgcggccctgagccaggcgctgcgcctggaggccccagagcttccagtaaaggtgaacccgacgaagccccggaggggcagcttcgaggtgacgctgctgcgcccggacggcagcagtgcggagctctggactgggattaagaaggggcccccacgcaaactcaaattccctgagcctcaagaggtggtggaagagttgaagaagtacctgtcgtagggagatttgggtagaagccctcatgctgagctttgtgtccctggtgatgttggaacattaatgatggaacatggccaaacttcagtcatgatcctgaagccatggtttcttccctgccagaaatgaaggttcagttatgaggcaaccctctagtaaggcattgtaaaagttactggatttggtttaataaaagttgaaataaagtatttgagtaatagagtaaaacttaatcttaagggatggacaaagccagccttgtggagttggtagtccttgtgtttttcatagcccaagatagccatgtgacctggaacttttaaaaaaaaatttttttttaagagccagagtctcactttgtcacccatgctggagtatagtggtgctatctcggctcactgcaaccattgtctcccaggttcaagcgatactcctgcctcagtctcctgagtagctgggatcacaggtgcacaccaccacgcctggctaatttttttatttttatttttagtaaaggcggggtttcaccatgttggccaggctggtctcaaactcctgacctcaagtgatatgcctgccttgacctcccaaagtgctggggttacaggcatgatgagccaccgcacctggcctgacctgcaacttttatgatctctggtaaaacatgagaaatacttgtaaaaat

SEQ ID NO: 27 - DNA, 814 bp, Homo Sapiens
ctgctgaagcggctttccttctgccagaatctcaggaactcctggatctgcctttccagaaccagcttctctctccctgctctgccttcagactgccctctttctacctctccctctagaactacatctcttctggctgggtttatagcttggggctgggggaggcccagtgggactggctgagtggagccagccgtgtgacggaggcggccctcttccagttgggcactgccaccctctcgtggtccaagcagcacatgagcagaaccaggtgctcaacaccaacagccggtacctgcatgacaacatcgtggactatgcgcagaggctgtcagagaccctgccggagcagctctgtgtgttctatttcctgaattctgggggtgttgggctcttcattggtgtggatctgatcaaagatgaggccacaaggacaccagcaactgaagaggctgcctacttggtatcaagacatggaagagaaggtgagaagttgtgaaacgctgaggctccagccctaagccagccctgctctgcctaagtgtactccagaagaaactcatctcatccaaatacacgctattgagaaggcgagcctgacctccctcttacagataaagtcagctttcagaggctcagggtgggggggcctgcccgaggccataatgctacccaccccctcctcctaaccactggtctgttggaataacccagatgtctgcatcccctcaagtcagtcaatttcctttctgtccactgggggtggaatggggtagggtgggatactttaaagtgctcctgcttaaataaatta

SEQ ID NO: 28 - DNA, 1002 bp, Homo Sapiens
acaggtggtatcccgaagcctaatgagcaccgcgatcggcgggtccctggagattgtcttgcacagcctgggccagaagtgtttaagcttttcccgagcagagacagtggcacagctgaggagcacagaacctcaactgtctggtgtgggtgaccggcagtggttgtatcagacatgtaccgagttcggcttctgggacacagacccctggcatgtgctaagtgtaacacaggctttaggatcctcagaatcaactcttcttatccgcactggctcccactgcttggacatggcacctgagaggccctcagactcccccagcctccgcctagggcgccagaacatcttccagcagctacagacctggctcaagctggcaaaggagagccagattaagggtgaagtctgaatctcataccctttccactccctgcatggtcacctcagtcctggacatacttgttcactgaacaaaagaaagcagcttgttttgaaagaagaaactcccaggaattggaattcagcacctgttccgcacgtaattggcatgtgtctgcaaacatccttattcccaacttaaagtgctttattgcagagagttatggaaatataagtggatgattattctcattgtaaatattggtattttgaatgttaaatgtcaaacaaatgtgacttatgctggtgccctcgccctgctgatcagattctggttcaaattctgccactccagctcctgggttaggggctttgctgtaagtttctttttctggactttagatcctgaacctgtccttgcttctcagtttctctcactgtacccctttccctcagtctcttcctctctctttcccctgtcactatttgtctttctaatctccttctgtttctctgaatatcttcatttctatctctgtgtttctgtctatttctctgtttatctttctgtccttcaatctgtgtttttgtttctggctctccgtcagtgtctttttctctcct

SEQ ID NO: 29 - DNA, 812 bp, Homo Sapiens
gtttactcgctgctgtgcccatctatcagcaggctccgggctgaagattgcttctcttctctcctccaaggtctagtgacggagcccgcgcgcggcgccaccatgcggcagaaggcggtatcgcttttcttgtgctacctgctgctcttcacttgcagtggggtggaggcaggtaagaaaaagtgctcggagagctcggacagcggctccgggttctggaaggccctgaccttcatggccgtcggaggaggactcgcagtcgccgggctgcccgcgctgggcttcaccggcgccggcatcgcggccaactcggtggctgcctcgctgatgagctggtctgcgatcctgaatgggggcggcgtgcccgccggggggctagtggccacgctgcagagcctcggggctggtggcagcagcgtcgtcataggtaatattggtgccctgatgggctacgccacccacaagtatctcgatagtgaggaggatgaggagtagccagcagctcccagaacctcttcttccttcttggcctaactcttccagttaggatctagaactttgcctttttttttttttttttttttttgagatgggttctcactatattgtccaggctagagtgcagtggctattcacagatgcgaacatagtacactgcagcctccaactcctagcctcaagtgatcctcctgtctcaacctcccaagtaggattacaagcatgcgccgacgatgcccagaatccagaactttgtctatcactctccccaacaacctagatgtgaaaacagaataaacttcacccagaaaaca

SEQ ID NO: 30 - DNA, 2900 bp, Homo Sapiens
gaaacttttcccaatccctaaaagggacttggcctctttttctgggctcagcggggcagccgctcggaccccggcgcgctgaccctcggggctgccgattcgctgggggcttggagagcctcctgcgcccctcctcgcgcgggccgagggtccacctgggtccccaggccgcggcgtctccgctgggtccgcggccgcccgcctgcccgcgctgccgccgccgggtcctggagccagcgaggagcggggccggcgctgcgcttgcccggggcgcgccctccaggatgccgatccgcccggtccgctgaaagcgcgcgcccctgctcggcccgagcgccgccgcccgcgcaccctcgccccggaggctgccaggagcccggggccgcccctcccgctcccctcctctccccctctggctctctcgcgctctctcgctctcagggcccccctcgctcccccggccgcagtccgtgcgcgagggcgccggcgagccgtctcggaagcagcatgcaggcgcgctactccgtgtccgaccccaacgccctgggagtggtgccctacctgagcgagcagaattactaccgggctgcgggcagctacggcggcatggccagccccatgggcgtctattccggccacccggagcagtacagcgcggggatgggccgctcctacgcgccctaccaccaccaccagcccgcggcgcctaaggacctggtgaagccgccctacagctacatcgcgctcatcaccatggccatccagaacgcgcccgagaagaagatcaccttgaacggcatctaccagttcatcatggaccgcttccccttctaccgggagaacaagcagggctggcagaacagcatccgccacaacctctcgctcaacgagtgcttcgtcaaggtgccccgcgacgacaagaagcccggcaagggcagttactggaccctggacccggactcctacaacatgttcgagaacggcagcttcctgcggcgccggcggcgcttcaaaaagaaggacgtgtccaaggagaaggaggagcgggcccacctcaaggagccgcccccggcggcgtccaagggcgccccggccaccccccacctagcggacgcccccaaggaggccgagaagaaggtggtgatcaagagcgaggcggcgtccccggcgctgccggtcatcaccaaggtggagacgctgagccccgagagcgcgctgcagggcagcccgcgcagcgcggcctccacgcccgccggctcccccgacggctcgctgccggagcaccacgccgcggcgcccaacgggctgcctggcttcagcgtggagaacatcatgaccctgcgaacgtcgccgccgggcggagagctgagcccgggggccggacgcgcgggcctggtggtgccgccgctggcgctgccctacgccgccgcgccgcccgccgcctacggccagccgtgcgctcagggcctggaggccggggccgccgggggctaccagtgcagcatgcgagcgatgagcctgtacaccggggccgagcggccggcgcacatgtgcgtcccgcccgccctggacgaggccctctcggaccacccgagcggccccacgtcgcccctgagcgctctcaacctcgccgccggccaggagggcgcgctcgccgccacgggccaccaccaccagcaccacggccaccaccacccgcaggcgccgccgcccccgccggctccccagccccagccgacgccgcagcccggggccgccgcggcgcaggcggcctcctggtatctcaaccacagcggggacctgaaccacctccccggccacacgttcgcggcccagcagcaaactttccccaacgtgcgggagatgttcaactcccaccggctggggattgagaactcgaccctcggggagtcccaggtgagtggcaatgccagctgccagctgccctacagatccacgccgcctctctatcgccacgcagccccctactcctacgactgcacgaaatactgacgtgtcccgggacctcccctccccggcccgctccggcttcgcttcccagccccgacccaaccagacaattaaggggctgcagagacgcaaaaaagaaacaaaacatgtccaccaaccttttctcagacccgggagcagagagcgggcacgctagcccccagccgtctgtgaagagcgcaggtaactttaattcgccgccccgtttctgggatcccaggaaacccctccaaagggacgcagcccaacaaaatgagtattgatcttaaaatccccctcccctaccaggacggctgtgctgtgctcgacctgagctttcaaaagttaagttatggaccaaatcccatagcgagcccctagtgactttctgtaggggtccccataggtgtatgggggtctctatagataatatatgtgctgtgtgtaattttaaatttctccaaccgtgctgtacaaatgtgtggatttgtaatcaggctattttgttgttgttgttgttgttcagagccattaatataatatttaaagttgagttcactggataagtttttcatcttgcccaaccatttctaactgccaaattgaattcaagaaaccgatgtgggttttgtttcctgtacaattatgagatataattctttttcccattgtaggtcttttacaaaacaagaaaataatttatttttttgttggtggataaagaagtcaagtatctgatactttttatttacaaagtgtgatggttttgtatagtaggttccaccctgagtattcctaaaagaaaaaaaaaaaaaaagcttaaaaactctaacttcatctgtgtttgtcttacgtggtcttaatcgttgtacttaccttaaaataaacccatgttgttttttctgcccaaa

SEQ ID NO: 31 - DNA, 5430 bp, Homo Sapiens
ctaggcggcggccgcggcggcggaggcagcagcggcggcggcagtggcggcggcgaaggtggcggcggctcggccagtactcccggcccccgccatttcggactgggagcgagcgcggcgcaggcactgaaggcggcggcggggccagaggctcagcggctcccaggtgcgggagagaggcctgctgaaaatgactgaatataaacttgtggtagttggagctggtggcgtaggcaagagtgccttgacgatacagctaattcagaatcattttgtggacgaatatgatccaacaatagaggattcctacaggaagcaagtagtaattgatggagaaacctgtctcttggatattctcgacacagcaggtcaagaggagtacagtgcaatgagggaccagtacatgaggactggggagggctttctttgtgtatttgccataaataatactaaatcatttgaagatattcaccattatagagaacaaattaaaagagttaaggactctgaagatgtacctatggtcctagtaggaaataaatgtgatttgccttctagaacagtagacacaaaacaggctcaggacttagcaagaagttatggaattccttttattgaaacatcagcaaagacaagacagagagtggaggatgctttttatacattggtgagagagatccgacaatacagattgaaaaaaatcagcaaagaagaaaagactcctggctgtgtgaaaattaaaaaatgcattataatgtaatctgggtgttgatgatgccttctatacattagttcgagaaattcgaaaacataaagaaaagatgagcaaagatggtaaaaagaagaaaaagaagtcaaagacaaagtgtgtaattatgtaaatacaatttgtacttttttcttaaggcatactagtacaagtggtaatttttgtacattacactaaattattagcatttgttttagcattacctaatttttttcctgctccatgcagactgttagcttttaccttaaatgcttattttaaaatgacagtggaagtttttttttcctctaagtgccagtattcccagagttttggtttttgaactagcaatgcctgtgaaaaagaaactgaatacctaagatttctgtcttggggcttttggtgcatgcagttgattacttcttatttttcttaccaattgtgaatgttggtgtgaaacaaattaatgaagcttttgaatcatccctattctgtgttttatctagtcacataaatggattaattactaatttcagttgagaccttctaattggtttttactgaaacattgagggaacacaaatttatgggcttcctgatgatgattcttctaggcatcatgtcctatagtttgtcatccctgatgaatgtaaagttacactgttcacaaaggttttgtctcctttccactgctattagtcatggtcactctccccaaaatattatattttttctataaaaagaaaaaaatggaaaaaaattacaaggcaatggaaactattataaggccatttccttttcacattagataaattactataaagactcctaatagcttttcctgttaaggcagacccagtatgaaatggggattattatagcaaccattttggggctatatttacatgctactaaatttttataataattgaaaagattttaacaagtataaaaaattctcataggaattaaatgtagtctccctgtgtcagactgctctttcatagtataactttaaatcttttcttcaacttgagtctttgaagatagttttaattctgcttgtgacattaaaagattatttgggccagttatagcttattaggtgttgaagagaccaaggttgcaaggccaggccctgtgtgaacctttgagctttcatagagagtttcacagcatggactgtgtccccacggtcatccagtgttgtcatgcattggttagtcaaaatggggagggactagggcagtttggatagctcaacaagatacaatctcactctgtggtggtcctgctgacaaatcaagagcattgcttttgtttcttaagaaaacaaactcttttttaaaaattacttttaaatattaactcaaaagttgagattttggggtggtggtgtgccaagacattaattttttttttaaacaatgaagtgaaaaagttttacaatctctaggtttggctagttctcttaacactggttaaattaacattgcataaacacttttcaagtctgatccatatttaataatgctttaaaataaaaataaaaacaatccttttgataaatttaaaatgttacttattttaaaataaatgaagtgagatggcatggtgaggtgaaagtatcactggactaggaagaaggtgacttaggttctagataggtgtcttttaggactctgattttgaggacatcacttactatccatttcttcatgttaaaagaagtcatctcaaactcttagttttttttttttacaactatgtaatttatattccatttacataaggatacacttatttgtcaagctcagcacaatctgtaaatttttaacctatgttacaccatcttcagtgccagtcttgggcaaaattgtgcaagaggtgaagtttatatttgaatatccattctcgttttaggactcttcttccatattagtgtcatcttgcctccctaccttccacatgccccatgacttgatgcagttttaatacttgtaattcccctaaccataagatttactgctgctgtggatatctccatgaagttttcccactgagtcacatcagaaatgccctacatcttatttcctcagggctcaagagaatctgacagataccataaagggatttgacctaatcactaattttcaggtggtggctgatgctttgaacatctctttgctgcccaatccattagcgacagtaggatttttcaaacctggtatgaatagacagaaccctatccagtggaaggagaatttaataaagatagtgctgaaagaattccttaggtaatctataactaggactactcctggtaacagtaatacattccattgttttagtaaccagaaatcttcatgcaatgaaaaatactttaattcatgaagcttactttttttttttggtgtcagagtctcgctcttgtcacccaggctggaatgcagtggcgccatctcagctcactgcaacctccatctcccaggttcaagcgattctcgtgcctcggcctcctgagtagctgggattacaggcgtgtgccactacactcaactaatttttgtatttttaggagagacggggtttcaccctgttggccaggctggtctcgaactcctgacctcaagtgattcacccaccttggcctcataaacctgttttgcagaactcatttattcagcaaatatttattgagtgcctaccagatgccagtcaccacacaaggcactgggtatatggtatccccaaacaagagacataatcccggtccttaggtagtgctagtgtggtctgtaatatcttactaaggcctttggtatacgacccagagataacacgatgcgtattttagttttgcaaagaaggggtttggtctctgtgccagctctataattgttttgctacgattccactgaaactcttcgatcaagctactttatgtaaatcacttcattgttttaaaggaataaacttgattatattgtttttttatttggcataactgtgattcttttaggacaattactgtacacattaaggtgtatgtcagatattcatattgacccaaatgtgtaatattccagttttctctgcataagtaattaaaatatacttaaaaattaatagttttatctgggtacaaataaacaggtgcctgaactagttcacagacaaggaaacttctatgtaaaaatcactatgatttctgaattgctatgtgaaactacagatctttggaacactgtttaggtagggtgttaagacttacacagtacctcgtttctacacagagaaagaaatggccatacttcaggaactgcagtgcttatgaggggatatttaggcctcttgaatttttgatgtagatgggcatttttttaaggtagtggttaattacctttatgtgaactttgaatggtttaacaaaagatttgtttttgtagagattttaaagggggagaattctagaaataaatgttacctaattattacagccttaaagacaaaaatccttgttgaagtttttttaaaaaaagctaaattacatagacttaggcattaacatgtttgtggaagaatatagcagacgtatattgtatcatttgagtgaatgttcccaagtaggcattctaggctctatttaactgagtcacactgcataggaatttagaacctaacttttataggttatcaaaactgttgtcaccattgcacaattttgtcctaatatatacatagaaactttgtggggcatgttaagttacagtttgcacaagttcatctcatttgtattccattgattttttttttcttctaaacattttttcttcaaacagtatataactttttttaggggatttttttttagacagcaaaaactatctgaagatttccatttgtcaaaaagtaatgatttcttgataattgtgtagtaatgttttttagaacccagcagttaccttaaagctgaatttatatttagtaacttctgtgttaatactggatagcatgaattctgcattgagaaactgaatagctgtcataaaatgaaactttctttctaaagaaagatactcacatgagttcttgaagaatagtcataactagattaagatctgtgttttagtttaatagtttgaagtgcctgtttgggataatgataggtaatttagatgaatttaggggaaaaaaaagttatctgcagatatgttgagggcccatctctccccccacacccccacagagctaactgggttacagtgttttatccgaaagtttccaattccactgtcttgtgttttcatgttgaaaatacttttgcatttttcctttgagtgccaatttcttactagtactatttcttaatgtaacatgtttacctggaatgtattttaactatttttgtatagtgtaaactgaaacatgcacattttgtacattgtgctttcttttgtgggacatatgcagtgtgatccagttgttttccatcatttggttgcgctgacctaggaatgttggtcatatcaaacattaaaaatgaccactcttttaattgaaattaacttttaaatgtttataggagtatgtgctgtgaagtgatctaaaatttgtaatatttttgtcatgaactgtactactcctaattattgtaatgtaataaaaatagttacagtgac

SEQ ID NO: 32 - DNA, 2840 bp, Homo Sapiens
aggtgatcatttcaaaccaagcatcagcaacaattaaaaatattcacttggtatctgtagtttaataatggaccaacatcaacatttgaataaaacagcagagtcagcatcttcagagaaaaagaaaacaagacgctgcaatggattcaagatgttcttggcagccctgtcattcagctatattgctaaagcactaggtggaatcattatgaaaatttccatcactcaaatagaaaggagatttgacatatcctcttctcttgctggtttaattgatggaagctttgaaattggaaatttgcttgtgattgtatttgtaagttactttggatctaaactacacagaccgaagttaattggaattggttgtctccttatgggaactggaagtattttgacatctttaccacatttcttcatgggatattataggtattctaaagaaacccatattaatccatcagaaaattcaacatcaagtttatcaacctgtttaattaatcaaaccttatcattcaatggaacatcacctgagatagtagaaaaagattgtgtaaaggaatctgggtcacacatgtggatctatgtcttcatggggaatatgcttcgtggcataggggaaacccccatagtaccattggggatttcatacattgatgattttgcaaaagaaggacattcttccttgtatttaggtagtttgaatgcaataggaatgattggtccagtcattggctttgcactgggatctctgtttgctaaaatgtacgtggatattggatatgtagatctgagcactatcagaataactcctaaggactctcgttgggttggagcttggtggcttggtttccttgtgtctggactattttccattatttcttccataccattttttttcttgccgaaaaatccaaataaaccacaaaaagaaagaaaaatttcactatcattgcatgtgctgaaaacaaatgatgatagaaatcaaacagctaatttgaccaaccaaggaaaaaatgttaccaaaaatgtgactggttttttccagtctttgaaaagcatccttaccaatcccctgtatgttatatttctgcttttgacattgttacaagtaagcagctttattggttcttttacttacgtctttaaatatatggagcaacagtacggtcagtctgcatctcatgctaactttttgttgggaatcataaccattcctacggttgcaactggaatgtttttaggaggatttatcattaaaaaattcaaattgtctttagttggaattgccaaattttcatttcttacttcgatgatatccttcttgtttcaacttctatatttccctctaatctgcgaaagcaaatcagttgccggcctaaccttgacctatgatggaaataattcagtggcatctcatgtagatgtaccactttcttattgcaactcagagtgcaattgtgatgaaagtcagtgggaaccagtctgtgggaacaatggaataacttacctgtcaccttgtctagcaggatgcaaatcctcaagtggtattaaaaagcatacagtgttttataactgtagttgtgtggaagtaactggtctccagaacagaaattactcagcacacttgggtgaatgcccaagagataatacttgtacaaggaaatttttcatctatgttgcaattcaagtcataaactctttgttctctgcaacaggaggtaccacatttatcttgttgactgtgaagattgttcaacctgaattgaaagcacttgcaatgggtttccagtcaatggttataagaacactaggaggaattctagctccaatatattttggggctctgattgataaaacatgtatgaagtggtccaccaacagctgtggagcacaaggggcttgtaggatatataattccgtattttttggaagggtctacttgggcttatctatagctttaagattcccagcacttgttttatatattgttttcatttttgctatgaagaaaaaatttcaaggaaaagataccaaggcatcggacaatgaaagaaaagtaatggatgaagcaaacttagaattcttaaataatggtgaacattttgtaccttctgctggaacagatagtaaaacatgtaatttggacatgcaagacaatgctgctgccaactaacattgcattgattcattaagatgttatttttgaggtgttcctggtctttcactgacaattccaacattctttacttacagtggaccaatggataagtctatgcatctataataaactataaaaaatgggagtacccatggttaggatatagctatgcctttatggttaagattagaatatatgatccataaaaatttaaagtgagaggcatggttagtgtgtgatacaataaaaagtaattgtttggtagttgtaactgctaataaaaccagtgactagaatataagggaggtaaaaaggacaagatagattaatagcctaaataaagagaaaagcctgatgcctttaaaaaaaatgaaacactttggatgtattacttaggccaaaatctggcctggatttatgctataatatatattttcatgttaagttgtatatttttcagaaattataaatattattaatttaaaatttgaatttgtgtttgactaacaacctcgatggatcttcttccaacctcccattaagatcctgcagaagaaatagaaatattcaaatattgcaaggtgtaattgtgagacaacttattataatacgtgttaagtttctactggacccatggaagtggattaagaaaaaccgactttagcttgagaaagcaaaa

SEQ ID NO: 33 - DNA, 759 bp, Homo Sapiens
cggattcttggtttagctaggccgcggggggtcggatagagtgggcacagtttgcaatggattttggataaacaagatctgttgaaggagcgccaaaaggatttaaagtttctctcagaggaagaatattggaagttacaaatattttttacaaatgttatccaagcattaggtgaacatcttaaattaagacaacaagttattgccactgctacggtatatttcaagagattctatgccaggtattctctgaaaagtatagatcctgtattaatggctcctacatgtgtgtttttggcatccaaagtagaggaatttggagtagtttcaaatacaagattgattgctgctgctacttctgtattaaaaactagattttcatatgcctttccaaaggaatttccttataggatgaatcatatattagaatgtgaattctatctgttagaactaatggattgttgcttgatagtgtatcatccttatagacctttgctccagtatgtgcaggacatgggccaagaagacatgttgcttccccttgcatggaggatagtgaatgatacctacagaacggatctttgcctactgtatcctcctttcatgatagctttagcttgcctacatgtagcctgtgttgtacagcagaaagatgccaggcaatggtttgctgagctttctgtggatatggaaaagattttggaaataatcagggttattttaaaactatatgagcagtggaagaatttcgatgagaga

SEQ ID NO: 34 - DNA, 4040 bp, Homo Sapiens
agagcgcggcgcggggccggcggcgaaggtccggggtggaatcgacgtcgctgcggctgccgacgacccacacccggccggccgcctccgcagacccaccttggccgcgcggcagggggcgcgcagagccccgagggagcgagtccccgcgcgtggcagctcggcggcttctcccttcgggaggtccggctcccggctctccggacccgcctggcgtcctcgcctgcggcggggcggacgacagcggcgcccaggaatggcttcggcgggcagcggcatggaggaggtgcgcgtgtcggtgctgacccccttgaagctggtcgggctggtgtgcatcttcctggcgctgtgtctggacctgggggcggtgctgagcccggcctgggtcacagctgaccaccagtactacctgtcgttgtgggagtcctgccggaaacccgccagcttggacatctggcactgcgagtccacgctcagcagcgattggcagattgctactctggctttactcctgggcggcgctgccatcattctcattgcattcctggtgggtttgatttctatctgcgtgggatctcgaaggcgtttctatagacctgttgcggtcatgctttttgcagcagttgttttacaggtttgcagcctggtcctttacccaatcaagttcattgaaactgtgagcttgaaaatttaccatgagttcaactggggttatggcctggcctggggtgcaactatattttcgtttgggggtgccatcctttattgcctgaaccctaagaactatgaagactactactagaaccaatagtctcaaagtaaaaacaaccaccaccatccaacaaaaggattacgtctgcatcttttctaacttactattttctaaaacacttgtggagcatcaagcagtttgctcagttgatttaatcttttttgccttttggctgtcaacatcataaccagcttttacatccattttagaaatctgcacaaattaagagagctgattagacataggcaaatgctgcaaacttccaatatgttcatatcgtttttcttgacaaatgaagggtctatatgacagcaaccattgtgagaaactagttggaatgagatttgcctcaatctcctattgcctgcaggggagcagttggcataagcaacatttagaagttcctttgcgctgacaaggattccactgttagagcccttaccgcctgcttatcctacccaatgactacattggctgttggttatttgcttgagtgagcccttgaaaaatgaactgcccttcagcatctaatgggagttgtgaatgtaactggttaatgatacacattccaccttcaggaacactctttttaatgggaggttatgctttggcaatcagcgtctccctgggaagagagtcaagacttggagacatgtgcttctcattatgtggttagaaattggtgcctcagccctatctagactggggaaaaattgaggatctctgtttttcctggggcaaacagaaagaaatctgcatgagttgcttttgtaccctttaaatcatttgccaaacattgcagcaaacaagtgtgcgtatgtaacaagcttcactgtttttatagaaggtgaaccattagtataaatggtaataagttgttccctaaccctccacatacatttgcctatcacacgtaaaattaatatttactctagtgaagtggtttgagcactaaccttgtacacattgttaagaggcttagattggtattcatacttatttaccatacaaaagtatggtaccttaaagcttttgctctatgttctttactgtttcactggaaagtgtcaatagagttgcctaagaataaaaattgaaatggtgttaatctgaaaattaatgattctctgtaagcactgtagttgaaaagagagtagcaattaggatgatcattttgtgtaaaattcattaaaatagaaggctgctattttttgcaagtattttaaatgtcttcatttttttaagaaaggaatagcgatagatttatataaatatctaaatgtctcagtagaggagtagaattcatctggttatcacctggtcctctgaagttaactgatgggctaaccgatttgtgcacacacttaggatggatttatgttaagggaattacttactgactgttcaatggaaggaagtattaataatagggaataagtttgcaactaatctcatgctgcaaacttgtgttaattctgtttaatatacaaatttggatagcttaattataaacatatttttatatcaaatatacagttctaatataaaagttataaataattatttttgttaacaaagacactaaaacagtatgttctggttttggccctcttgcagaaagaagcattagaaaaattactttaaaagtagctatatgttactgtattgcaaaatctgttaagagcaggaccacatcgatagtatttaataatttgttttacctcccaaaacacagttcttctttcagcttgtcttaagaatggttgccaaaaacaacagccaaaaaaaaaaaacctattttattatccaaatgctagaaaacacacatgaattttctataaaatcacgaatatgaagtaccaggtttagtcttactttagcaatgatagacaaaagcgaataaatacatcacagacagaaacctttataaaaatatatgattctataaagaatcattagaaattatgagtggaaattctccagaaagatagtattatagagtcttttgaagcaattttttgagaaatagtaaaatctggggcagagtgtcttgcagttaattgcatattgtcagagcagcatgagaaatatgatatttggatagggatttcagcaactaaacattctctgttctgagatctctttattcctgaataatgaaagaatagtactttggtgctgacaccaatgaggcacttctcttggtcctagtagaggatgcagtgtactgttaaaccaatatcatcacatctcgagtcttatcaagttttcattctctgtcaatatgacaagctcaaagtgacagaatatgttataggttgaagcacacatatttgcagtttactgaaaagtagatttcttatgtgacttttttcccttctcagcaaagagccctacactagatttctaccatcactaatatttggaagtatttcattactaacaatctcagtacaacatgaaaattgttgcttctcatctaaaatacaattttgtctatcagaataaacacaagtgaaattttcacctacattaacattatgtctttgcagctttaggtttgttagatgtgttcttaagcataatttttagccacaaacccattgttagatagatatctatggatatagatctacatctatagatatagatatacacacatatatatactcacacacatatagcataaaatactcagcagggctagttattccgatttcttgcacaattatttagctttttgtaagttcaacatgtaaattttaaagacataaatatagagagacttatgtgtttgaatataaatgatatatatggattagcatgtacctgtatattattaaacatgcaatgaactgactggtaagtgacgtctaattgtatggctagcaatgtaatttattcagactgtatttttgtacagagcagtgcactctaacctatgcctctgtgtcctctttaatgcctaaagctgtgcctagaaatttcatctgtcttaaaagtaaaatatacttcatgctgtttatgctattagtttctgtactgctattctatatttattatttttaaatatatgacatgtttactacttaaacatgaattcatggtatcctggttattttttttaagtcatctgggggaaaacctgtttatcactccagtgattttgagtttgcagtttcacaatcagttcttcatttcatgatttttgtagttgacatgaagtcatctatgtggaaaaaaataaaaataaaagtgatttcacgga

SEQ ID NO: 35 - DNA, 4302 bp, Homo Sapiens
aactgaaaatccacaagacagaatagccagatctcagaggagcctggctaagcaaaaccctgcagaacggctgcctaatttacagcaaccatgagtacaaatggtgatgatcatcaggtcaaggatagtctggagcaattgagatgtcactttacatgggagttatccattgatgacgatgaaatgcctgatttagaaaacagagtcttggatcagattgaattcctagacaccaaatacagtgtgggaatacacaacctactagcctatgtgaaacacctgaaaggccagaatgaggaagccctgaagagcttaaaagaagctgaaaacttaatgcaggaagaacatgacaaccaagcaaatgtgaggagtctggtgacctggggcaactttgcctggatgtattaccacatgggcagactggcagaagcccagacttacctggacaaggtggagaacatttgcaagaagctttcaaatcccttccgctatagaatggagtgtccagaaatagactgtgaggaaggatgggccttgctgaagtgtggaggaaaaaattatgaacgggccaaggcctgctttgaaaaggtgcttgaagtggaccctgaaaaccctgaatccagcgctgggtatgcgatctctgcctatcgcctggatggctttaaattagccacaaaaaatcacaagccattttctttgcttcccctaaggcaggctgtccgcttaaatccagacaatggatatattaaggttctccttgccctgaagcttcaggatgaaggacaggaagctgaaggagaaaagtacattgaagaagctctagccaacatgtcctcacagacctatgtctttcgatatgcagccaagttttaccgaagaaaaggctctgtggataaagctcttgagttattaaaaaaggccttgcaggaaacacccacttctgtcttactgcatcaccagatagggctttgctacaaggcacaaatgatccaaatcaaggaggctacaaaagggcagcctagagggcagaacagagaaaagctagacaaaatgataagatcagccatatttcattttgaatctgcagtggaaaaaaagcccacatttgaggtggctcatctagacctggcaagaatgtatatagaagcaggcaatcacagaaaagctgaagagaattttcaaaaattgttatgcatgaaaccagtggtagaagaaacaatgcaagacatacatttccactatggtcggtttcaggaatttcaaaagaaatctgacgtcaatgcaattatccattatttaaaagctataaaaatagaacaggcatcattaacaagggataaaagtatcaattctttgaagaaattggttttaaggaaacttcggagaaaggcattagatctggaaagcttgagcctccttgggttcgtctacaaattggaaggaaatatgaatgaagccctggagtactatgagcgggccctgagactggctgctgactttgagaactctgtgagacaaggtccttaggcacccagatatcagccactttcacatttcatttcattttatgctaacatttactaatcatcttttctgcttactgttttcagaaacattataattcactgtaatgatgtaattcttgaataataaatctgacaaaatattagttgtgttcaacaattagtgaaacagaatgtgtgtatgcatgtaagaaagagaaatcatttgtatgagtgctatgtagtagagaaaaaatgttagttaactttgtaggaaataaaacattggacttacactaaatgtttaattcattcattttattgtgaaataaaaataaaatccttagctcctccaccaactgaacagaccctcttggccaaggagaccccagaaaccttaaaaactaagtttcccaaccatgacaagatgagagatcattcacacctcattatattccctcccttgctaactgccattggactttttccactgagttaaacagaaacccatggaaaacaaagaacagaagactcactccttggctgacttcacctagctcactccacgtagcgccacagccagactcccctcccctcttgcggtttccacatgacaactgatcagccttccctcctgataagtgaccactgcccacagactggttctggccagtccatggaggctgcacacagggtgcctctatgtcctttgtttcaccttttgatatagaaaggctaattttgctgtattttaatgttaagtctccaccacagagtgaacacagaatgcatgtgacatacatgtttacataccactattgtgtgactgcccctcatgaatattcatagccccccataacctgttaactatgtgtgtctagccaatccaccaaccataaaacttctgtaataccctcccttcctccaagagcctgcttttggttgctgtggtaggctctgcttcccaggctgcaggttgcaggagaggaggctgcagtggctcacgcctgtaatctcagcacttcgatgggacgaggcaggcagatcacctgaacccaggagttcgagagcagccttggcaatggcaaaaccaaccgtctctacaaaaaatgcaaaaacttagctgggtgtggtggcatgcacctgtagcttcagttccagctactcaggaggctgaggtgagtggactgctggagccagggagttcgaggctgcagtgtcgagatcttgccactgcactccattctggatgatagaacgagaccccatctcaaaaaaaaaaaaagttctctccaattgtatatagcttgtgattttatgtcaacactatcaataaatagctttcagtgcaagaaaccaaaaatactgtaataaacaggcacatattcttcccaaacctcatgcagtttacaatctagtgagagacacagatagcagtacagagtcaattaaaggttagttttcttcatgaagatgttttaattttaattcaatgtgaaagggttccaaggagtttatcttgttttatgccattttatttgaagcactacttactaagtcatttgctgatattaatctagttaaatcaagaaatattacatgaaaatgttgctaaatcagagatcatgggtaacaatcacctttgattatgaataatcatattttattgaaaggcaaggcacaacaaataataagaaggaaaaaataaataagcaatgttattgatctttcattctgtatatgttttggggggaatatactagtttcttttagtggctgtaacaaattaccacaaacttggtgacttaaaatttcacagatttactctttcttacagttctggaggtcagaagtctgaaatgggtttcaatgagccaaagtcaaggtattgatgacgctacactcctccggaggctctaggcagatagccttttccagcttccagaggctgcctgaattctttcatccatcttaaaaaccaacagtgtagtagcctcaaatctctctctctgcttccttcttcacatctccttctctcctctgactcttttgcctctttcttctaaggacgcaccaggtccacctgcataatccagaataattgccccatccgcaaatccttaatttaataacatctgcaaagtcccttttgctatgtaaagtagcatgttcacaggttctggagacttggccatggatacgattgcggggggggcattattcttaccacagagcaccccaagaaaatctccaaattttgggcttccaatccattttgcttcaattatttaatatttttactccttccagtagatactgatttcatccattgcccttaagaaggtaggacagagattatggcacatctcacattaaatgctatattttcgttggaaatacattttttgcttcaacttttattttaaattcaagggtacatgtgcaggatgttcaggtttgttacacaggtaaacgtgtgccatggcggtttgctgaacagatcatcccatcaccaacagatcatcccattgagaggtgaagccggctgggcttctgggttgggtggggacttggagaacttttctgtctagctaaagtattgtaaaatggaccagtcaacactctgtaaaatggaccaatcagctctctgtaaaatggaccaatcagcaggatgtgggtggggccaagtaagggaataaaagcaggccacccgagctggcagcggcaacccgctcgggtccccttccatgctgtggaagttttgttctttcgctctttcaataaatcttgctgctgctca

SEQ ID NO: 36 - DNA, 2900 bp, Homo Sapiens; identical to SEQ ID NO: 30

SEQ ID NO: 37 - DNA, 1929 bp, Homo Sapiens
cattggagtttccatcaggactccaggtcccctatcctgtcctctgcaacccaaacgtccaggaggatcatgacctgcggatcaggatttggtgggcgcgccttcagctgcatctcggcctgcgggccgcggcccggccgctgctgcatcaccgccgccccctaccgtggcatctcctgctaccgcggcctcaccgggggcttcggcagccacagcgtgtgcggaggctttcgggccggctcctgcggacgcagcttcggctaccgctccgggggcgtgtgcgggcccagtcccccatgcatcaccaccgtgtcggtcaacgagagcctcctcacgcccctcaacctggagatcgaccccaacgcgcagtgcgtgaagcaggaggagaaggagcagatcaagtccctcaacagcaggttcgcggccttcatcgacaaggtgcgcttcctggagcagcagaacaaactgctggagacaaagctgcagttctaccagaaccgcgagtgttgccagagcaacctggagcccctgtttgagggctacatcgagactctgcggcgggaggccgagtgcgtggaggccgacagcgggaggctggcctcagagcttaaccacgtgcaggaggtgctggagggctacaagaagaagtatgaggaggaggtttctctgagagcaacagctgagaacgagtttgtggctctgaagaaggatgtggactgcgcctacctccgcaagtcagacctggaggccaacgtggaggccctgatccaggagatcgacttcctgaggcggctgtatgaggaggagatcctcattctccagtcgcacatctcagacacctccgtggttgtcaagctggacaacagccgggacctgaacatggactgcatcattgccgagattaaggcacagtatgacgacattgtcacccgcagccgggccgaggccgagtcctggtaccgcagcaagtgtgaggagatgaaggccacggtgatcaggcacggggagaccctgcgccgcaccaaggaggagatcaatgagctgaaccgcatgatccaaaggctgacggccgaggtggagaatgccaagtgccagaactccaagctggaggccgcggtggcccagtctgagcagcagggtgaggcggccctcagtgatgcccgctgcaagctggccgagctggagggcgccctgcagaaggccaagcaggacatggcctgcctgatcagggagtaccaggaggtgatgaactccaagctgggcctggacatcgagatcgccacctacaggcgcctgctggagggcgaggagcagaggctatgtgaaggcattggggctgtgaatgtctgtgtcagcagctcccggggcggggtcgtgtgcggggacctctgcgtgtcaggctcccggccagtgactggcagtgtctgcagcgctccgtgcaacgggaacgtggcggtgagcaccggcctgtgtgcgccctgcggccaattgaacaccacctgcggagggggttcctgcggcgtgggctcctgtggtatcagctccctgggtgtggggtcttgcggcagcagctgccggaaatgttaggcaccccaactcaagtcccaggccccaggcatctttcctgccctgccttgcttggcccatccagtccaggcgcctggagcaagtgctcagctacttctcctgcactttgaaagacccctcccactcctggcctcacatttctctgtgtgatcccccacttctgggctctgccaccccacagtgggaaaggccaccctagaaagaagtccgctggcacccataggaaggggcctcaggagcaggaagggccaggaccagaaccttgcccacggcaactgccttcctgcctctccccttcctcctctgctcttgatctgtgtttcaataaattaatgtagccaa

SEQ ID NO: 38 - DNA, 3393 bp, Homo Sapiens
ggcagaagaggaagatttctgaagagtgcagctgcctgaaccgagccctgccgaacagctgagaattgcactgcaaccatgagtgagaacaataagaattccttggagagcagcctacggcaactaaaatgccatttcacctggaacttgatggagggagaaaactccttggatgattttgaagacaaagtattttaccggactgagtttcagaatcgtgaattcaaagccacaatgtgcaacctactggcctatctaaagcacctcaaagggcaaaacgaggcagccctggaatgcttacgtaaagctgaagagttaatccagcaagagcatgctgaccaggcagaaatcagaagtctggtcacctggggaaactatgcctgggtctactatcacatgggccgactctcagacgttcagatttatgtagacaaggtgaaacatgtctgtgagaagttttccagtccctatagaattgagagtccagagcttgactgtgaggaagggtggacacggttaaagtgtggaggaaaccaaaatgaaagagcgaaggtgtgctttgagaaggctctggaaaagaagccaaagaacccagaattcacctctggactggcaatagcaagctaccgtctggacaactggccaccatctcagaacgccattgaccctctgaggcaagccattcggctgaatcctgacaaccagtaccttaaagtcctcctggctctgaagcttcataagatgcgtgaagaaggtgaagaggaaggtgaaggagagaagttagttgaagaagccttggagaaagccccaggtgtaacagatgttcttcgcagtgcagccaagttttatcgaagaaaagatgagccagacaaagcgattgaactgcttaaaaaggctttagaatacataccaaacaatgcctacctgcattgccaaattgggtgctgctatagggcaaaagtcttccaagtaatgaatctaagagagaatggaatgtatgggaaaagaaagttactggaactaataggacacgctgtggctcatctgaagaaagctgatgaggccaatgataatctcttccgtgtctgttccattcttgccagcctccatgctctagcagatcagtatgaagacgcagagtattacttccaaaaggaattcagtaaagagcttactcctgtagcgaaacaactgctccatctgcggtatggcaactttcagctgtaccaaatgaagtgtgaagacaaggccatccaccactttatagagggtgtaaaaataaaccagaaatcaagggagaaagaaaagatgaaagacaaactgcaaaaaattgccaaaatgcgactttctaaaaatggagcagattctgaggctttgcatgtcttggcattccttcaggagctgaatgaaaaaatgcaacaagcagatgaagactctgagaggggtttggagtctggaagcctcatcccttcagcatcaagctggaatggggaatgaagaatagagatgtggtgcccactaggctactgctgaaagggagctgaaattcctccaccaagttggtattcaaaatatgtaatgactggtatggcaaaagattggactaagacactggccataccactggacagggttatgttaacacctgaattgctgggtcttgagagagcccaaggagttctgggagagggaccagattggggggtaggtccacgggcttggtgatagaattatttctcgattgacttcttgagtgcaatttgaactgtaacatttgcttagtcacctttagtggagtaatctactgggcttgtttctatatttatataaagcagccaaatccttcatgtaatattgaagtccatttttgcaatgttgttccatacttggagtcattttgcatcccatagaggttagtcctgcatagccagtaatgtgctaagttcatccaaaagctggcggaccaaagtctaaatagggctcagtatcccccatcgcttatctctgcctccttcctcctccttcccagtctatcatcaaccttgagtattctacacaatgtgaattcaagtgcctgattaattgaggtggcaacatagtttgagacgagggcagagaacaggaagatacatagctagaagcgacgggtacaaaaagcaatgtgtacaagaagactttcagcaagtatacagagagttcacctctactctgccctcctcatagtcataatgtagcaagtaaagaatgagaatggattctgtacaatacactagaaaccaacataatgtatttctttaaaacctgtgtgaaaaaataaatgttccaccagtagggataggggaaaagtaaccaaaagagagaaagagaaaggaatgctggtttatctttgtagattgtaatcgaatggagaaatttgcagtattttagccactattaggaattttttttttttgtaaaatgaagactgaactctgttcaaatgctttcatgaacctggtttgagacggtaggaaagcaacaaaacgtgggaacctggtgactaagggcctggtgcaaggacttgggaaatgtcattgataatagatggtggggttttcccccctttagaaatgttggatattaagtgatataaacacttcttttaactccgaaaatcttctgagaaatcacaaaattcacggtatgcttggaacgattgagattttctaggtagatgctgaatagcctagacatcaaagttggtgtgaaccaaaatagagtcagctgacccagcatcagccacactctgggttggaaaatgtttgcctgttggaattaatttaagcttaagtatatatcaacattattttattgtgcaattaaaacaatacaaattcatggttttttaaagttaaaaattctaaccactgtaacaacagtttttgtgttattttctgtattaaacatcttgttgcacgcatttgaggtcatcagggtgcaaaatttgtattcctgaaaatgtcatatattttcattaataaataacctaaatatgataaaacataaagcagtgttctggttcatctggaattttgctgtactttaaatctttcagactcagctactgataaatgaaacgttacacaggtgtgaaccaaatccaaataacctcgactggtctactatcataatcacctgaacagaacaaaactttttcctcagctttaagagtccagggcttcggataacagctgccatctgccacctgctaccattgacctacgtgaacacagacattctgtctccaccttgatggtgggtgggctgctccccttttctttgttaaattttgtgctttcatcacattttctctattctgacctctgttatgagaaataaaagtcactgattcca

SEQ ID NO: 39 - DNA, 1556 bp, Homo Sapiens
cagggactaggctgcccaggccctgcctgcttggctggggctgggggctgctgggaggtggctgggaggctgggcctgggcagctaagctggagctttggccagggtccagagcctccctcccttcagcttcctgctgcacagaaccctcgcccctggccaccccgtgctgcctccttgccctggcagacccagcactggctgctgctagtcagatggggtagcgggcaggggccggaggggccaccctcccagctgacccagcctcctgggccgcttcttccaaaccagcagggtagaaagatggggcacccaccagtctctcccagtgccccggccccagctggcaccacagctatacctgggcttattccagaccttgtcgccgggaccccctggccccgctgggctctcattgccggcgcccttgccgcgggcgtcctcctcgtctcctgcctcctctgtgctgcctgctgctgctgccgccgccacaggaagaagcccagggacaaggagtccgtgggtctgggcagtgcccgcggcaccaccaccacccacctggtgcaacctgatgtggatggcctggagtccagcccgggggatgctcagcaatgggggtgcctgcagctctccctggagttcgactttggaagccaggagatcagggtgggcctgaggcaggcagccgacctgaggcctgggggcaccgtggacccctatgcccgggtcagcgtctccacccaggccggacacagacatgagacaaaagtgcaccgaggcacgctctgccccgtgtttgacgagacctgctgcttccacatcccgcaggcggagctgccaggggccaccctgcaggtgcagcttttcaacttcaagcgcttctcggggcatgagcccctgggtgagctccgtctgccactgggcaccgtggatctgcagcatgttctggagcactggtacctgctgggcccgccggctgccactcagcccgagcaggtcggggagctgtgcttctctctccggtacgtgcccagctcaggccggctgaccgtggtggtgctggaggctcgaggcctgcgtccaggacttgcagagccctacgtgaaggtccagctcatgctgaaccagaggaagtggaagaagagaaagacagccaccaaaaagggcacggcggccccctacttcaatgaggccttcaccttcctggtgcccttcagccaggtccagaatgtggacctggtgctggctgtctgggaccgcagcctgccgctccgaactgagcccgtaggcaaggtgcacctgggtgcccgggcctcggggcagcccctgcagcactgggcagacatgctggcccacgcccggcggcccattgcccagcggcaccccctgcggccagccagggaggtggaccgcatgctggccctgcagccccgccttcgcctgcgcctgcccttgccccactcctgaatgcaccacatgcctctgtctccccgctgagcccaggcacttgcccaggccgccctgcaggaccactgcaataaacgccttctcctgcca

SEQ ID NO: 40 - DNA, 2776 bp, Homo Sapiens
gcactccagcactgcgcagggaccgccttggaccgcagttgccggccaggaatcccagtgtcacggtggacacgcctccctcgcgcccttgccgcccacctgctcacccagctcaggggctttggaattctgtggccacactgcgaggagatcggttctgggtcggaggctacaggaagactcccactccctgaaatctggagtgaagaacgccgccatccagccaccattccaaggaggtgcaggagaacagctctgtgataccatttaacttgttgacattacttttatttgaaggaacgtatattagagcttactttgcaaagaaggaagatggttgtttccgaagtggacatcgcaaaagctgatccagctgctgcatcccaccctctattactgaatggagatgctactgtggcccagaaaaatccaggctcggtggctgagaacaacctgtgcagccagtatgaggagaaggtgcgcccctgcatcgacctcattgactccctgcgggctctaggtgtggagcaggacctggccctgccagccatcgccgtcatcggggaccagagctcgggcaagagctccgtgttggaggcactgtcaggagttgcccttcccagaggcagcgggatcgtgaccagatgcccgctggtgctgaaactgaagaaacttgtgaacgaagataagtggagaggcaaggtcagttaccaggactacgagattgagatttcggatgcttcagaggtagaaaaggaaattaataaagcccagaatgccatcgccggggaaggaatgggaatcagtcatgagctaatcaccctggagatcagctcccgagatgtcccggatctgactctaatagaccttcctggcataaccagagtggctgtgggcaatcagcctgctgacattgggtataagatcaagacactcatcaagaagtacatccagaggcaggagacaatcagcctggtggtggtccccagtaatgtggacatcgccaccacagaggctctcagcatggcccaggaggtggaccccgagggagacaggaccatcggaatcttgacgaagcctgatctggtggacaaaggaactgaagacaaggttgtggacgtggtgcggaacctcgtgttccacctgaagaagggttacatgattgtcaagtgccggggccagcaggagatccaggaccagctgagcctgtccgaagccctgcagagagagaagatcttctttgagaaccacccatatttcagggatctgctggaggaaggaaaggccacggttccctgcctggcagaaaaacttaccagcgagctcatcacacatatctgtaaatctctgcccctgttagaaaatcaaatcaaggagactcaccagagaataacagaggagctacaaaagtatggtgtcgacataccggaagacgaaaatgaaaaaatgttcttcctgatagataaagttaatgcctttaatcaggacatcactgctctcatgcaaggagaggaaactgtaggggaggaagacattcggctgtttaccagactccgacacgagttccacaaatggagtacaataattgaaaacaattttcaagaaggccataaaattttgagtagaaaaatccagaaatttgaaaatcagtatcgtggtagagagctgccaggctttgtgaattacaggacatttgagacaatcgtgaaacagcaaatcaaggcactggaagagccggctgtggatatgctacacaccgtgacggatatggtccggcttgctttcacagatgtttcgataaaaaattttgaagagttttttaacctccacagaaccgccaagtccaaaattgaagacattagagcagaacaagagagagaaggtgagaagctgatccgcctccacttccagatggaacagattgtctactgccaggaccaggtatacaggggtgcattgcagaaggtcagagagaaggagctggaagaagaaaagaagaagaaatcctgggattttggggctttccagtccagctcggcaacagactcttccatggaggagatctttcagcacctgatggcctatcaccaggaggccagcaagcgcatctccagccacatccctttgatcatccagttcttcatgctccagacgtacggccagcagcttcagaaggccatgctgcagctcctgcaggacaaggacacctacagctggctcctgaaggagcggagcgacaccagcgacaagcggaagttcctgaaggagcggcttgcacggctgacgcaggctcggcgccggcttgcccagttccccggttaaccacactctgtccagccccgtagacgtgcacgcacactgtctgcccccgttcccgggtagccactggactgacgacttgagtgctcagtagtcagactggatagtccgtctctgcttatccgttagccgtggtgatttagcaggaagctgtgagagcagtttggtttctagcatgaagacagagccccaccctcagatgcacatgagctggcgggattgaaggatgctgtcttcgtactgggaaagggattttcagccctcagaatcgctccaccttgcagctctccccttctctgtattcctagaaactgacacatgctgaacatcacagcttatttcctcatttttataatgtcccttcacaaacccagtgttttaggagcatgagtgccgtgtgtgtgcgtcctgtcggagccctgtctcctctctctgtaataaactcatttctagcaga

SEQ ID NO: 41 - DNA, 3266 bp, Homo Sapiens
tgactagacggccagcctgttaaggtggccccagatattccagcctcagcccagagtcctcctgtgcccctactgcagcaagggtgtctccaagaagggggacctggagtcagcccgtcacacctggtttcctctctgctagggtccctcctcccacagagcactggagggcagctgaggaggagctaccttaaaaaaggaggtgtgtgccagggagctgggtaggagcctggctatatatctgcccagcagcggtactctcgggacagagatggcactgatgcaggaactgtatagcacaccagcctccaggctggactccttcgtggctcagtggctgcagccccaccgggagtggaaggaagaggtgctagacgctgtgcggaccgtggaggagtttctgaggcaggagcatttccaggggaagcgtgggctggaccaggatgtgcgggtgctgaaggtagtcaaggtgggctccttcgggaatggcacggttctcaggagcaccagagaggtggagctggtggcgtttctgagctgtttccacagcttccaggaggcagccaagcatcacaaagatgttctgaggctgatatggaaaaccatgtggcaaagccaggacctgctggacctcgggctcgaggacctgaggatggagcagagagtccccgatgctctcgtcttcaccatccagaccagggggactgcggagcccatcacggtcaccattgtgcctgcctacagagccctggggccttctcttcccaactcccagccaccccctgaggtctatgtgagcctgatcaaggcctgcggtggtcctggaaatttctgcccatccttcagcgagctgcagagaaatttcgtgaaacatcggccaactaagctgaagagcctcctgcgcctggtgaaacactggtaccagcagtatgtgaaagccaggtcccccagagccaatctgccccctctctatgctcttgaacttctaaccatctatgcctgggaaatgggtactgaagaagacgagaatttcatgttggacgaaggcttcaccactgtgatggacctgctcctggagtatgaagtcatctgtatctactggaccaagtactacacactccacaatgcaatcattgaggattgtgtcagaaaacagctcaaaaaagagaggcccatcatcctggatccggccgaccccaccctcaacgtggcagaagggtacagatgggacatcgttgctcagagggcctcccagtgcctgaaacaggactgttgctatgacaacagggagaaccccatctccagctggaacgtgaagagggcacgagacatccacttgacagtggagcagaggggttacccagatttcaacctcatcgtgaacccttatgagcccataaggaaggttaaagagaaaatccggaggaccaggggctactctggcctgcagcgtctgtccttccaggttcctggcagtgagaggcagcttctcagcagcaggtgctccttagccaaatatgggatcttctcccacactcacatctatctgctggagaccatcccctccgagatccaggtcttcgtgaagaatcctgatggtgggagctacgcctatgccatcaaccccaacagcttcatcctgggtctgaagcagcagattgaagaccagcaggggcttcctaaaaagcagcagcagctggaattccaaggccaagtcctgcaggactggttgggtctggggatctatggcatccaagacagtgacactctcatcctctcgaagaagaaaggagaggctctgtttccagccagttagttttctctgggagacttctctgtacatttctgccatgtactccagaactcatcctgtcaatcactctgtcccattgtctactgggaaggtcccaggtcttcaccagttttacaatgagttatcccaggccagacgtggtagctcacacctgtaatcccagaactttgggaggccgaggtgggaggagcgcttgagccgaggagttcaagaccagcctgggtatcacagggagaccccgtctctacaaaataaaaaaataattcactgggtgtggttgtgcacatttgtagtctcaggcactcaagaagctgaggcagaagaatcacttgagcccaggaggctgaagctgcagtgagctgtgatcacaccgctacactcctgcccaggccacagagcaagaccctgtgtctaaaaactaaaacataaaaataagtaaatccgtttaaaaaaaggattatcccagccctgccagggggaggatgaggaggggtgtgaggactaaatatacaaataaatagtgtggtcacatgacgcacagcaacagaattcggacccacagccttctgcagcaatcaaccccaaaccatcaggacttgggcgataactggcagcatctctaactccccaccctactcccatcctgcttcctatttatgaccaacccaagaaacccaaataagctccccagaccaatcacatggttagccccacttctggtgagtgcacttccagcttccccataccaacagcctcaatcacggcatccctgaagccttcccattttcctgcctgtctttaaatctctgtcaaaagcgagagatgggtggctggttcctttgctatagcaagttgggaataaatcgcctttgttagttctcatttgggggctgtttatttccacagggcctaatgctgtcctaatggttattgcttgatcatttgagcttctcaactctaagaaatgaggactggggaaactgaggcaaaaagagacaaagaatgggagattgaggatgatgcagtgtaaaaaaaaatcacctcaactcctaaaacccatacacaaacagtacataatagtcaggaaactgtaggaaagtaatagcatctttattatcaaaggacgtcatgtgatcaggtttactccaagcaataaaaagtttccttttgcccccctgttttgcctagttttctggtgggctactctcctaccatagcatagaaaatgcacactgcaattggttatcaacagcctctggtcaatttagcaatcataatctgtgtatctcccacctctgtttgccttcagggacagaaaaagtgcctcctttccaggaggtagacaggctgttccagtccccatctttgtgtccttcataatgcccagcacagcccacattgtaggtggtgggaaaattcttgtttaaaataaaaaaaagaatgaaaaatgcaa

SEQ ID NO: 42 - DNA, 1682 bp, Homo Sapiens
cattttgtgcctgcctagctatccagacagagcagctaccctcagctctagctgatactacagacagtacaacagatcaagaagtatggcagtgacaactcgtttgacatggttgcacgaaaagatcctgcaaaatcattttggagggaagcggcttagccttctctataagggtagtgtccatggattccgtaatggagttttgcttgacagatgttgtaatcaagggcctactctaacagtgatttatagtgaagatcatattattggagcatatgcagaagagagttaccaggaaggaaagtatgcttccatcatcctttttgcacttcaagatactaaaatttcagaatggaaactaggactatgtacaccagaaacactgttttgttgtgatgttacaaaatataactccccaactaatttccagatagatggaagaaatagaaaagtgattatggacttaaagacaatggaaaatcttggacttgctcaaaattgtactatctctattcaggattatgaagtttttcgatgcgaagattcactggatgaaagaaagataaaaggggtcattgagctcaggaagagcttactgtctgccttgagaacttatgaaccatatggatccctggttcaacaaatacgaattctgctgctgggtccaattggagctgggaagtccagctttttcaactcagtgaggtctgttttccaagggcatgtaacgcatcaggctttggtgggcactaatacaactgggatatctgagaagtataggacatactctattagagacgggaaagatggcaaatacctgccgtttattctgtgtgactcactggggctgagtgagaaagaaggcggcctgtgcagggatgacatattctatatcttgaacggtaacattcgtgatagataccagtttaatcccatggaatcaatcaaattaaatcatcatgactacattgattccccatcgctgaaggacagaattcattgtgtggcatttgtatttgatgccagctctattcaatacttctcctctcagatgatagtaaagatcaaaagaattcgaagggagttggtaaacgctggtgtggtacatgtggctttgctcactcatgtggatagcatggatttgattacaaaaggtgaccttatagaaatagagagatgtgagcctgtgaggtccaagctagaggaagtccaaagaaaacttggatttgctctttctgacatctcggtggttagcaattattcctctgagtgggagctggaccctgtaaaggatgttctaattctttctgctctgagacgaatgctatgggctgcagatgacttcttagaggatttgccttttgagcaaatagggaatctaagggaggaaattatcaactgtgcacaaggaaaaaaatagatatgtgaaaggttcacgtaaatttcctcacatcacagaagattaaaattcagaaaggagaaaacacagaccaaagagaagtatctaagaccaaagggatgtgttttattaatgtctaggatgaagaaatgcatagaacattgtagtacttgtaaataactagaaataacatgatttagtcataattgtgaaaaataataataatttttcttggatttatgttctgtatctgtgaaaaaataaatttcttataaaactcggg

SEQ ID NO: 43 - DNA, 2214 bp, Homo Sapiens
attccaagtcgctgctgtgcagagcagcaagtgctccgtgcagggctgttgctatcacttggaggtgaacagcctcttttgccggtattcagtgaagaaagcaagtctaaatatgcagttctctcactggagtgaaagatgttttgttcatttctaatcaactatgctagacagctgcaagctgaaaagtgcctgcaatttgccatttatttgtaataagaaaataataaacactgctggaaccagtaatgcagaagtccccttggctgatcccggaatgtaccagctggacattacattaagaaggggtcaaagtttagctgctcgagatcgaggagggacgagtgatccatatgtgaagtttaaaatcggaggaaaagaagtttttagaagtaagataatacacaagaacctcaaccctgtgtgggaagaaaaagcttgtattctggttgatcatcttagggagccattgtatataaaggtatttgactatgattttggactacaggatgactttatgggctcagcctttctggatctgacacaattggagttaaacaggcccacagatgtgacccttactctgaaagatcctcattatcctgaccatgatcttggaatcattttgctctcagtcatccttacccctaaagaaggagagtccagggatgtgtttcagacccaaagtttacgcctatcagacctacacagaaaatcgcatctttggagaggaatagtcagcatcaccttgattgaagggagagacctcaaggccatggattccaacgggttgagcgatccctacgtgaagttccggcttgggcatcagaagtacaagagcaagattatgccaaaaacgttgaatcctcagtggagggaacaatttgattttcacctttatgaagaaagaggaggagtcattgatatcactgcatgggacaaagatgctgggaaaagggatgatttcattggcaggtgccaggtcgacctgtcagccctcagtagggaacagacgcacaagctggagttgcagctggaagagggtgagggacacctggtgctgctggtcactctgacagcatcagccacagtcagcatctctgacctgtctgtcaactccctggaggaccagaaggaacgagaggagatattaaagagatatagcccattgaggatatttcacaacctgaaagatgtgggatttctccaggtgaaagtcatcagagcggaagggttaatggctgccgacgtcactggaaaaagtgacccattttgtgtggtagaactgaacaacgatagactgctaacacatactgtctacaaaaatctcaatcctgagtggaataaagtcttcacgttcaacattaaagatatccattcagttcttgaagtgacagtttatgatgaagatcgggatcgaagtgctgactttctgggcaaagttgctataccattgctgtctattcaaaatggtgaacagaaagcctacgtcttgaaaaacaagcagctgacagggccaacaaagggggtcatctatcttgaaatagatgtgatttttaatgctgtgaaagccagcttacgaacattaatacccaaagaacagaagtacattgaagaggaaaacagactctctaaacagctgctactaagaaactttatcagaatgaaacgttgtgtcatggtgctggtaaatgctgcatactacgttaatagttgctttgattgggattcacccccaaggagtctcgctgcttttgtgctctttctctttgttgtctggaactttgagctctacatgataccactggttttgttgttactattgacatggaactacttcttgataatatcagggaaagataacaggcaacgtgatacagtagtggaggacatgctagaggacgaggaagaagaagatgacaaagatgacaaggacagtgaaaaaaagggatttataaataaaatctatgccatccaggaggtatgtgtcagtgtccagaacatcctagatgaagtggcttcctttggcgaaaggataaagaatactttcaactggactgtcccattcttaagctggctggccattgtagccctctgtgtgttcacagccatcctgtactgcattccgctgagatacattgtccttgtctggggcatcaataaatttacaaaaaagcttcggagtccatatgcaattgataacaatgaactact

SEQ ID NO: 44 - DNA, 644 bp, Homo Sapiens
ttaagacggtgaggtcagcttcacattctcaggaactctccttctttgggtctggctgaagttgaggatctcttactctctaggccacggaattaacccgagcaggcatggaggcctctgctctcacctcatcagcagtgaccagtgtggccaaagtggtcagggtggcctctggctctgccgtagttttgcccctggccaggattgctacagttgtgattggaggagttgtggccatggcggctgtgcccatggtgctcagtgccatgggcttcactgcggcgggaatcgcctcgtcctccatagcagccaagatgatgtccgcggcggccattgccaatgggggtggagttgcctcgggcagccttgtggctactctgcagtcactgggagcaactggactctccggattgaccaagttcatcctgggctccattgggtctgccattgcggctgtcattgcgaggttctactagctccctgcccctcgccctgcagagaagagaaccatgccaggggagaaggcacccagccatcctgacccagcgaggagccaactatcccaaatatacctggggtgaaatataccaaattctgcatctccagaggaaaataagaaataaagatgaattgttgcaactctt

SEQ ID NO: 45 - DNA, 637 bp, Homo Sapiens
ggcggctgagaggcagcgaactcatctttgccagtacaggagcttgtgccgtggcccacagcccacagcccacagccatgggctgggacctgacggtgaagatgctggcgggcaacgaattccaggtgtccctgagcagctccatgtcggtgtcagagctgaaggcgcagatcacccagaagatcggcgtgcacgccttccagcagcgtctggctgtccacccgagcggtgtggcgctgcaggacagggtcccccttgccagccagggcctgggccccggcagcacggtcctgctggtggtggacaaatgcgacgaacctctgagcatcctggtgaggaataacaagggccgcagcagcacctacgaggtacggctgacgcagaccgtggcccacctgaagcagcaagtgagcgggctggagggtgtgcaggacgacctgttctggctgaccttcgaggggaagcccctggaggaccagctcccgctgggggagtacggcctcaagcccctgagcaccgtgttcatgaatctgcgcctgcggggaggcggcacagagcctggcgggcggagctaagggcctccaccagcatccgagcaggatcaagggccggaaataaaggctgttgtaaagagaaa

SEQ ID NO: 46 - DNA, 1492 bp, Homo Sapiens
tctccaagaagggggacctggagtcagcccgtcacacctggtttcctctctgctagggtccctcctcccacagagcactggagggcagctgaggaggagctaccttaaaaaaggaggtgtgtgccagggagctgggtaggagcctggctatatatctgcccagcagcggtactctcgggacagagatggcactgatgcaggaactgtatagcacaccagcctccaggctggactccttcgtggctcagtggctgcagccccaccgggagtggaaggaagaggtgctagacgctgtgcggaccgtggaggagtttctgaggcaggagcatttccaggggaagcgtgggctggaccaggatgtgcgggtgctgaaggtagtcaaggtgggctccttcgggaatggcacggttctcaggagcaccagagaggtggagctggtggcgtttctgagctgtttccacagcttccaggaggcagccaagcatcacaaagatgttctgaggctgatatggaaaaccatgtggcaaagccaggacctgctggacctcgggctcgaggacctgaggatggagcagagagtccccgatgctctcgtcttcaccatccagaccagggggactgcggagcccatcacggtcaccattgtgcctgcctacagagccctggggccttctcttcccaactcccagccaccccctgaggtctatgtgagcctgatcaaggcctgcggtggtcctggaaatttctgcccatccttcagcgagctgcagagaaatttcgtgaaacatcggccaactaagctgaagagcctcctgcgcctggtgaaacactggtaccagcaggcccatcatcctggatccggccgaccccaccctcaacgtggcagaagggtacagatgggacatcgttgctcagagggcctcccagtgcctgaaacaggactgttgctatgacaacagggagaaccccatctccagctggaacgtgaagagggcacgagacatccacttgacagtggagcagaggggttacccagatttcaacctcatcgtgaacccttatgagcccataaggaaggttaaagagaaaatccggaggaccaggggctactctggcctgcagcgtctgtccttccaggttcctggcagtgagaggcagcttctcagcagcaggtgctccttagccaaatatgggatcttctcccacactcacatctatctgctggagaccatcccctccgagatccaggtcttcgtgaagaatcctgatggtgggagctacgcctatgccatcaaccccaacagcttcatcctgggtctgaagcagcagattgaagaccagcaggggcttcctaaaaagcagcagcagctggaattccaaggccaagtcctgcaggactggttgggtctggggatctatggcatccaagacagtgacactctcatcctctcgaagaagaaaggagaggctctgtttccagccagttagtttt

SEQ ID NO: 47 - DNA, 1056 bp, Homo Sapiens
tgcgacgcacgcaggcgtagtacggtcccccgggcgacagcggtggcggctcctcggggtgctcggctccctcccacctaggccggccccggcccgactcgccctcagaaactcactgtttggggctgcggactttctcgtcgtgccccacaaaagtaaagcttggggacctggggggagccggaagtatcgcttcgagatccccaaatactatcggggaaacggaagtggccgtcggtggcaggtttgggggagaccggaagtgacgagacctgtcggccatggagcctaatgatagtaccagtaccgctgtggaggagcctgacagcttggaggtgttggtgaagaccttggactctcaaactcgtacctttattgtgggggcccagatgaatgtaaaagagtttaaggagcacattgctgcctctgtcagcatcccatctgaaaaacaacggctcatttaccagggacgagttctgcaagatgataagaagcttcaggaatacaatgttgggggaaaggttatccacctggtggaacgggctcctcctcagactcacctcccttctggggcatcttctgggacggggtctgcctcagccactcatggtgggggatccccccctggtactcgggggcctggggcctctgttcatgaccggaatgccaacagctatgtcatggttggaaccttcaatcttcctagtgacggctctgctgtggatgttcacatcaacatggaacaggccccgattcagagtgagccccgggtacggctggtgatggctcagcacatgatcagggatatacagaccttactatcccggatggagtgtcgaggagggccccaaccgcagcacagtcagccgcccccgcagccaccggctgtgaccccggagccagtagccttgagctctcaaacatcagaaccagttgaaagtgaagcacctccccgggagcccatggaggcagaagaagtggaggagcgtgccccagcccagaacccggagctcactcctggcccagccccagcgggcccaacacctgccccggaaa

SEQ ID NO: 48 - DNA, 2390 bp, Homo Sapiens
gcagacaggaagacttctgaagaacaaatcagcctggtcaccagcttttcggaacagcagagacacagagggcagtcatgagtgaggtcaccaagaattccctggagaaaatccttccacagctgaaatgccatttcacctggaacttattcaaggaagacagtgtctcaagggatctagaagatagagtgtgtaaccagattgaatttttaaacactgagttcaaagctacaatgtacaacttgttggcctacataaaacacctagatggtaacaacgaggcagccctggaatgcttacggcaagctgaagagttaatccagcaagaacatgctgaccaagcagaaatcagaagtctagtcacttggggaaactacgcctgggtctactatcacttgggcagactctcagatgctcagatttatgtagataaggtgaaacaaacctgcaagaaattttcaaatccatacagtattgagtattctgaacttgactgtgaggaagggtggacacaactgaagtgtggaagaaatgaaagggcgaaggtgtgttttgagaaggctctggaagaaaagcccaacaacccagaattctcctctggactggcaattgcgatgtaccatctggataatcacccagagaaacagttctctactgatgttttgaagcaggccattgagctgagtcctgataaccaatacgtcaaggttctcttgggcctgaaactgcagaagatgaataaagaagctgaaggagagcagtttgttgaagaagccttggaaaagtctccttgccaaacagatgtcctccgcagtgcagccaaattttacagaagaaaaggtgacctagacaaagctattgaactgtttcaacgggtgttggaatccacaccaaacaatggctacctctatcaccagattgggtgctgctacaaggcaaaagtaagacaaatgcagaatacaggagaatctgaagctagtggaaataaagagatgattgaagcactaaagcaatatgctatggactattcgaataaagctcttgagaagggactgaatcctctgaatgcatactccgatctcgctgagttcctggagacggaatgttatcagacaccattcaataaggaagtccctgatgctgaaaagcaacaatcccatcagcgctactgcaaccttcagaaatataatgggaagtctgaagacactgctgtgcaacatggtttagagggtttgtccataagcaaaaaatcaactgacaaggaagagatcaaagaccaaccacagaatgtatctgaaaatctgcttccacaaaatgcaccaaattattggtatcttcaaggattaattcataagcagaatggagatctgctgcaagcagccaaatgttatgagaaggaactgggccgcctgctaagggatgccccttcaggcataggcagtattttcctgtcagcatctgagcttgaggatggtagtgaggaaatgggccagggcgcagtcagctccagtcccagagagctcctctctaactcagagcaactgaactgagacagaggaggaaaacagagcatcagaagcctgcagtggtggttgtgacgggtaggacgataggaagacagggggccccaacctgggattgctgagcagggaagctttgcatgttgctctaaggtacatttttaaagagttgttttttggccgggcgcagtggctcatgcctgtaatcccagcactttgggaggccgaggtgggcggatcacgaggtctggagtttgagaccatcctggctaacacagtgaaatcccgtctctactaaaaatacaaaaaattagccaggcgtggtggctggcacctgtagtcccagctacttgggaggctgaggcaggagaatggcgtgaacctggaaggaagaggttgcagtgagccaagattgcgcccctgcactccagcctgggcaacagagcaagactccatctcaaaaaaaaaaaaaaaaaaaaaaaagagttgttttctcatgttcattatagttcattacagttacatagtccgaaggtcttacaactaatcactggtagcaataaatgcttcaggcccacatgatgctgattagttctcagttttcattcagttcacaatataaccaccattcctgccctccctgccaagggtcataaatggtgactgcctaacaacaaaatttgcagtctcatctcattttcatccagacttctggaactcaaagattaacttttgactaaccctggaatatctcttatctcacttatagcttcaggcatgtatttatatgtattcttgatagcaataccataatcaatgtgtattcctgatagtaatgctacaataaatccaaacatttcaactctgtta

SEQ ID NO: 49 - DNA, 828 bp, Homo Sapiens
agaaccgtttactcgctgctgtgcccatctatcagcaggctccgggctgaagattgcttctcttctctcctccaaggtctagtgacggagcccgcgcgcggcgccaccatgcggcagaaggcggtatcgcttttcttgtgctacctgctgctcttcacttgcagtggggtggaggcaggtgagaatgcgggtaagaaaaagtgctcggagagctcggacagcggctccgggttctggaaggccctgaccttcatggccgtcggaggaggactcgcagtcgccgggctgcccgcgctgggcttcaccggcgccggcatcgcggccaactcggtggctgcctcgctgatgagctggtctgcgatcctgaatgggggcggcgtgcccgccggggggctagtggccacgctgcagagcctcggggctggtggcagcagcgtcgtcataggtaatattggtgccctgatgggctacgccacccacaagtatctcgatagtgaggaggatgaggagtagccagcagctcccagaacctcttcttccttcttggcctaactcttccagttaggatctagaactttgcctttttttttttttttttttttttgagatgggttctcactatattgtccaggctagagtgcagtggctattcacagatgcgaacatagtacactgcagcctccaactcctagcctcaagtgatcctcctgtctcaacctcccaagtaggattacaagcatgcgccgacgatgcccagaatccagaactttgtctatcactctccccaacaacctagatgtgaaaacagaataaacttcacccagaaaa

SEQ ID NO: 50 - DNA, 1833 bp, Homo Sapiens
catttcctctctgctgagagccagggaaggcgagctctgcgcacacgggcgtccctgcagcagccactctgctttccaggaccggccaactgccctggaggcatccacacaggggcccaggcagcacagaggagctgtgaacccgctccacaccggccaccctgcccggagcctggcactcacagcaggccggtgctaaggagtgtggcgcgggctcgactcccactgctgccggcctcccgagtgactctgttttccactgctgcaggcgagaagaggcacgcgcggcacaggccggcctccgcttcccgggaagacggcgcactcctggccctgggttcttgctgctgcccaccctctgctccctgggatgggccccgaggcgagcagcttcagcacaggcctggccctgctccaggtgcaggaaggaggataaggccgggccgagaggcggcacacctggaccatcccatgggcctccgcccgcgccgccccgaggatgagtggtgatgtcctctagccacccctagcagcgtcggctctccctggacgtgcggccgcggactgggacttggctttctccggataagcggcggcaccggcgtcagcgatgaccgtgcagagactcgtggccgcggccgtgctggtggccctggtctcactcatcctcaacaacgtggcggccttcacctccaactgggtgtgccagacgctggaggatgggcgcaggcgcagcgtggggctgtggaggtcctgctggctggtggacaggacccggggagggccgagccctggggccagagccggccaggtggacgcacatgactgtgaggcgctgggctggggctccgaggcagccggcttccaggagtcccgaggcaccgtcaaactgcagttcgacatgatgcgcgcctgcaacctggtggccacggccgcgctcaccgcaggccagctcaccttcctcctggggctggtgggcctgcccctgctgtcacccgacgccccgtgctgggaggaggccatggccgctgcattccaactggcgagttttgtcctggtcatcgggctcgtgactttctacagaattggcccatacaccaacctgtcctggtcctgctacctgaacattggcgcctgccttctggccacgctggcggcagccatgctcatctggaacattctccacaagagggaggactgcatggccccccgggtgattgtcatcagccgctccctgacagcgcgctttcgccgtgggctggacaatgactacgtggagtcaccatgctgagtcgcccttctcagcgctccatcaacgcacacctgctatcgtggaacagcctagaaaccaagggactccaccaccaagtcacttcccctgctcgtgcagaggcacgggatgagtctgggtgacctctgcgccatgcgtgcgagacacgtgtgcgtttactgttatgtcggtcatatgtctgtacgtgtcgtgggccaacctcgttctgcctccagctttcctggttagcgcaacgcggctccacgaccacacgcacttcagggtggaagctggaagctgagacacaggttaggtggcgcgaggctgccctgcgctccgctttgctttgggattaatttattctgcatctgctgagaggggcaccccagccatatcttacactttggtaaagcagaaaaccaggaaaattttcttaaaatatccacaatattccttgagtgagtcagaatctatagccggttagtgatggtttcagacagaatcgtgttcgtgtctgttttgctcgattcttttcctaagttaaataaatgcaagcctctgaa

SEQ ID NO: 51 - DNA, 3962 bp, Homo Sapiens
acaattcttggaagaggagaactggacgttgtgaacagagttagctggtaaatgtcctcttaaaagatccaaaaaatgagacttctagcaaagattatttgccttatgttatgggctatttgtgtagcagaagattgcaatgaacttcctccaagaagaaatacagaaattctgacaggttcctggtctgaccaaacatatccagaaggcacccaggctatctataaatgccgccctggatatagatctcttggaaatgtaataatggtatgcaggaagggagaatgggttgctcttaatccattaaggaaatgtcagaaaaggccctgtggacatcctggagatactccttttggtacttttacccttacaggaggaaatgtgtttgaatatggtgtaaaagctgtgtatacatgtaatgaggggtatcaattgctaggtgagattaattaccgtgaatgtgacacagatggatggaccaatgatattcctatatgtgaagttgtgaagtgtttaccagtgacagcaccagagaatggaaaaattgtcagtagtgcaatggaaccagatcgggaataccattttggacaagcagtacggtttgtatgtaactcaggctacaagattgaaggagatgaagaaatgcattgttcagacgatggtttttggagtaaagagaaaccaaagtgtgtggaaatttcatgcaaatccccagatgttataaatggatctcctatatctcagaagattatttataaggagaatgaacgatttcaatataaatgtaacatgggttatgaatacagtgaaagaggagatgctgtatgcactgaatctggatggcgtccgttgccttcatgtgaagaaaaatcatgtgataatccttatattccaaatggtgactactcacctttaaggattaaacacagaactggagatgaaatcacgtaccagtgtagaaatggtttttatcctgcaacccggggaaatacagcaaaatgcacaagtactggctggatacctgctccgagatgtaccttgaaaccttgtgattatccagacattaaacatggaggtctatatcatgagaatatgcgtagaccatactttccagtagctgtaggaaaatattactcctattactgtgatgaacattttgagactccgtcaggaagttactgggatcacattcattgcacacaagatggatggtcgccagcagtaccatgcctcagaaaatgttattttccttatttggaaaatggatataatcaaaatcatggaagaaagtttgtacagggtaaatctatagacgttgcctgccatcctggctacgctcttccaaaagcgcagaccacagttacatgtatggagaatggctggtctcctactcccagatgcatccgtgtcaaaacatgttccaaatcaagtatagatattgagaatgggtttatttctgaatctcagtatacatatgccttaaaagaaaaagcgaaatatcaatgcaaactaggatatgtaacagcagatggtgaaacatcaggatcaattacatgtgggaaagatggatggtcagctcaacccacgtgcattaaatcttgtgatatcccagtatttatgaatgccagaactaaaaatgacttcacatggtttaagctgaatgacacattggactatgaatgccatgatggttatgaaagcaatactggaagcaccactggttccatagtgtgtggttacaatggttggtctgatttacccatatgttatgaaagagaatgcgaacttcctaaaatagatgtacacttagttcctgatcgcaagaaagaccagtataaagttggagaggtgttgaaattctcctgcaaaccaggatttacaatagttggacctaattccgttcagtgctaccactttggattgtctcctgacctcccaatatgtaaagagcaagtacaatcatgtggtccacctcctgaactcctcaatgggaatgttaaggaaaaaacgaaagaagaatatggacacagtgaagtggtggaatattattgcaatcctagatttctaatgaagggacctaataaaattcaatgtgttgatggagagtggacaactttaccagtgtgtattgtggaggagagtacctgtggagatatacctgaacttgaacatggctgggcccagctttcttcccctccttattactatggagattcagtggaattcaattgctcagaatcatttacaatgattggacacagatcaattacgtgtattcatggagtatggacccaacttccccagtgtgtggcaatagataaacttaagaagtgcaaatcatcaaatttaattatacttgaggaacatttaaaaaacaagaaggaattcgatcataattctaacataaggtacagatgtagaggaaaagaaggatggatacacacagtctgcataaatggaagatgggatccagaagtgaactgctcaatggcacaaatacaattatgcccacctccacctcagattcccaattctcacaatatgacaaccacactgaattatcgggatggagaaaaagtatctgttctttgccaagaaaattatctaattcaggaaggagaagaaattacatgcaaagatggaagatggcagtcaataccactctgtgttgaaaaaattccatgttcacaaccacctcagatagaacacggaaccattaattcatccaggtcttcacaagaaagttatgcacatgggactaaattgagttatacttgtgagggtggtttcaggatatctgaagaaaatgaaacaacatgctacatgggaaaatggagttctccacctcagtgtgaaggccttccttgtaaatctccacctgagatttctcatggtgttgtagctcacatgtcagacagttatcagtatggagaagaagttacgtacaaatgttttgaaggttttggaattgatgggcctgcaattgcaaaatgcttaggagaaaaatggtctcaccctccatcatgcataaaaacagattgtctcagtttacctagctttgaaaatgccatacccatgggagagaagaaggatgtgtataaggcgggtgagcaagtgacttacacttgtgcaacatattacaaaatggatggagccagtaatgtaacatgcattaatagcagatggacaggaaggccaacatgcagagacacctcctgtgtgaatccgcccacagtacaaaatgcttatatagtgtcgagacagatgagtaaatatccatctggtgagagagtacgttatcaatgtaggagcccttatgaaatgtttggggatgaagaagtgatgtgtttaaatggaaactggacggaaccacctcaatgcaaagattctacaggaaaatgtgggccccctccacctattgacaatggggacattacttcattcccgttgtcagtatatgctccagcttcatcagttgagtaccaatgccagaacttgtatcaacttgagggtaacaagcgaataacatgtagaaatggacaatggtcagaaccaccaaaatgcttacatccgtgtgtaatatcccgagaaattatggaaaattataacatagcattaaggtggacagccaaacagaagctttattcgagaacaggtgaatcagttgaatttgtgtgtaaacggggatatcgtctttcatcacgttctcacacattgcgaacaacatgttgggatgggaaactggagtatccaacttgtgcaaaaagatagaatcaatcataaagtgcacacctttattcagaactttagtattaaatcagttctcaatttcattttttatgtattgttttactcctttttattcatacgtaaaattttggattaatttgtgaaaatgtaattataagctgagaccggtggctctcttcttaaaagcaccatattaaatcctggaaaactaa

SEQ ID NO: 52 - DNA, 2256 bp, Homo Sapiens
actgcctttccttcttcccgcgagtcagaagcttcgcgagggcccagagaggcggtggggtgggcgaccctacgccagctccgggcgggagaaagcccaccctctcccgcgccccaggaaaccgccggcgttcggcgctgcgcagagccatggaattctcctggctggagacgcgctgggcgcggcccttttacctggcgttcgtgttctgcctggccctggggctgctgcaggccattaagctgtacctgcggaggcagcggctgctgcgggacctgcgccccttcccagcgccccccacccactggttccttgggcaccagaagtttattcaggatgataacatggagaagcttgaggaaattattgaaaaataccctcgtgccttccctttctggattgggccctttcaggcatttttctgtatctatgacccagactatgcaaagacacttctgagcagaacagatcccaagtcccagtacctgcagaaattctcacctccacttcttggaaaaggactagcggctctagacggacccaagtggttccagcatcgtcgcctactaactcctggattccattttaacatcctgaaagcatacattgaggtgatggctcattctgtgaaaatgatgctggataagtgggagaagatttgcagcactcaggacacaagcgtggaggtctatgagcacatcaactcgatgtctctggatataatcatgaaatgcgctttcagcaaggagaccaactgccagacaaacagcacccatgatccttatgcaaaagccatatttgaactcagcaaaatcatatttcaccgcttgtacagtttgttgtatcacagtgacataattttcaaactcagccctcagggctaccgcttccagaagttaagccgagtgttgaatcagtacacagatacaataatccaggaaagaaagaaatccctccaggctggggtaaagcaggataacactccgaagaggaagtaccaggattttctggatattgtcctttctgccaaggatgaaagtggtagcagcttctcagatattgatgtacactctgaagtgagcacattcctgttggcaggacatgacaccttggcagcaagcatctcctggatcctttactgcctggctctgaaccctgagcatcaagagagatgccgggaggaggtcaggggcatcctgggggatgggtcttctatcacttgggaccagctgggtgagatgtcgtacaccacaatgtgcatcaaggagacgtgccgattgattcctgcagtcccgtccatttccagagatctcagcaagccacttaccttcccagatggatgcacattgcctgcagggatcaccgtggttcttagtatttggggtcttcaccacaaccctgctgtctggaaaaacccaaaggtctttgaccccttgaggttctctcaggagaattctgatcagagacacccctatgcctacttaccattctcagctggatcaaggaactgcattgggcaggagtttgccatgattgagttaaaggtaaccattgccttgattctgctccacttcagagtgactccagaccccaccaggcctcttactttccccaaccattttatcctcaagcccaagaatgggatgtatttgcacctgaagaaactctctgaatgttagatctcagggtacaatgattaaacgtactttgtttttcgaagttaaatttacagctaatgatccaagcagatagaaagggatcaatgtatggtgggaggattggaggttggtgggataggggtctctgtgaagagatccaaaatcatttctaggtacacagtgtgtcagctagatctgtttctatataactttgggagattttcagatcttttctgttaaactttcactactattaatgctgtatacaccaatagactttcatatattttctgttgtttttaaaatagttttcagaattatgcaagtaataagtgcatgtatgctcactgtcaaaaattcccaacactagaaaatcatgtagaataaaaattttaaatctcacttcacttagccgacattccatgccctgaccaatcctactgcttttcctaaaaacagaataatttggtgtgcattctttcagactttttcctatacattttatatgtagaaatgtagcaatgtatttgtatagatgtgatcattcctatattgttattgatttttttcacttaataaaaattcaccttattcctta

SEQ ID NO: 53 - DNA, 758 bp, Homo Sapiens
ccttcagcataaaagctgatccacaaacaagaggagcaccagacctcctcttggcttcgagatggcttcgccacaccaagagcccaaacctggagacctgattgagattttccgccttggctatgagcactgggccctgtatataggagatggctacgtgatccatctggctcctccaagtgagtaccccggggctggctcctccagtgtcttctcagtcctgagcaacagtgcagaggtgaaacgggagcgcctggaagatgtggtgggaggctgttgctatcgggtcaacaacagcttggaccatgagtaccaaccacggcccgtggaggtgatcatcagttctgcgaaggagatggttggtcagaagatgaagtacagtattgtgagcaggaactgtgagcactttgtcacccagctgagatatggcaagtcccgctgtaaacaggtggaaaaggccaaggttgaagtcggtgtggccacggcgcttggaatcctggttgttgctggatgctcttttgcgattaggagataccaaaaaaaagcgacagcctgaagcagccacaaaatcctgtgttagaagcagctgtgggggtcccagtggagatgagcctcccccatgcctccagcagcctgaccctcgtgccctgtctcaggcgttctctagatcctttcctctgtttccctctctcgctggcaaaagtatgatctaattgaaacaagactgaaggatcaataaacagccatctgccccttca

SEQ ID NO: 54 - DNA, 6203 bp, Homo Sapiens
agtcgcgtcaagcaggctattccgggtttgtggctgcttggctccacacgtgggccgccgtaggtattccgaccggtaattcctcctattggtgtgcagcagccacattgaaggatagagtggcagcagaggccaaggatcgtgagttgatggagtttgctgctgaaaatgaagggaagtctgggggaggtctccacagcgtagctgagggggtgcggctaagtccagagcctggcagggagggagtaagggacttagcaggggcggaggagttcggcggcggagaggaggggacagggctgacagggataaaggagataggggatggagaggaaggaagtggacaaaggccagaggaaataccgatggacctaacggtagtgaagcaggaaattatagactggccaggtacagaaggcaggttggctggccagtgggtagaacaggaggtggaggataggcctgaggtgaaggatgagaacgcaggcgtattggaggtgaagcaggagacggatagtagtttagtggtaaaagaagcgaaggtgggtgaaccagaggtaaaggaagagaaggtaaaggaagaggtaatggactggtcagaagtgaaggaagagaaggataacttggagataaaacaggaggagaagtttgttggtcaatgcataaaagaggaattgatgcatggagagtgtgtaaaagaagagaaggatttcctgaagaaagaaatcgtggatgatacaaaggtgaaagaagagcctccgataaatcacccggtgggctgcaagcggaaactggccatgtcaaggtgtgagacttgtggtacagaagaagcaaagtacagatgtccacgttgtatgcgatattcctgcagtttgccctgtgtaaagaaacacaaagcagaactgacatgtaatggagttcgagataaaactgcatacatttcaatacaacagtttactgaaatgaatctcctaagtgattatcgatttttggaagatgtggcaagaacagcggaccatatttctagagatgcttttttgaagagaccaataagcaataaatatatgtactttatgaaaaatcgtgcccggaggcaaggtattaacttaaaacttctacccaatggattcaccaagaggaaggagaattcaaccttttttgataagaaaaaacaacagttttgttggcatgtgaagctccagtttcctcaaagtcaagctgagtacatagaaaaaagagtaccagatgataaaactattaatgaaatcctaaaaccttacattgatcctgaaaagtctgatcctgtaattcgtcaaaggttgaaagcctacattcgctctcagactggggttcagattttaatgaagattgaatatatgcagcaaaatttagtaagatattatgaactagatccttataaaagtctcctagacaatttgaggaacaaagtgatcattgagtatccaacattacatgtggtattgaaaggatccaataatgacatgaaagttcttcaccaagtgaagagtgaatctaccaagaacgttggcaatgaaaattgagcattttttctggaagaagaaagtgaaaacttccagacaactgcagcagactctgcattgatgggctgttggctgattggggtattgtcaatgggtgattggaattttttctttgtatgaaaaataagcttaactcttttaaaaaatgtattttataacctcttgaattaattgacttgtaagacccatttattcatattaagaactctcctttgcacttgatcagcatagtacttattaggccctggctttttaatatgcttaattgcttaattccataaactgaaaactttttttttcttttttctttctttttttgagatggggtcttggagtgcaagtggtatgagcatagcttcctcaaattcctgggctcgaatggtcctctcactgcagcctcccaacaggctggtaccaccacactcagctaagttttttgttgttgtttttttttggtagagacagggttgcgctctttcgcccaggctggtctcaaatttgtggcctcaagcaatccttccacctcagactccaaagcattgggattacaggcatcagccaccacacctggccttgaacattttttatttgttaatttcatgcgtgacgaaacccaaggatcacccatgtcaaccacaaagttggcattccctttagtagaacctcactaaacggaaaggctgtacaacgcaccgtctagccacaggagaactaatcttctatcagttgccctttcttctttggagtttttatgtaacttacccttgtgagacaagttttctacttgagaaactcctagtacaatgtcttatactagaagcctggataaatactattaactactgtttcttatattcacttcagaaaatcagtggctccacattgtttgagccattagtgataacaaatttggatctacttactcaagtcttatgaattctgtgcctttcatcacattcctagcccactctcatcattactgcagaagggtgttgtgatgaccagttttatactgtgttttgatatgtctagcaataacttaaagaaaaaaaaacctgggaaatcttcaacatgttattggaacatatatgtatgtattaatgtatatacatggcttaacttatacgttatggcagctctgtatacagtttgatctcatgtactgaaaaaaaattcttaattttattggagtttataccactgtgaaactgcaatatgactgtaagagagtaaaaagattgttacatctatattgtatgtgtgtacttaatggttaaaaagcaatgataaaactggacattaatgaaattgatttttagttacagttggaataagttttttaccaaaaagaaaccagagacgttagttaaggagacttaaaaagatctgaaatatgaaaagagaatgagaagatgagcagaagataaatttgtgggacacaagtataacttggggtagaaactggagaagagaatcgaaaaacaataatgccagaaggacccttggtatgaaagtactaatggaatgtgattcatagaaagttcatagaaagtgagtccttgcaacttgagaaacatacatacatatatatttataatctctaaagcaacatcaggaatcttctaatatatgataaagaatttgtgtagaattacgttgttcacagtattattggagagacaaataagatttcaaggaattcatttataatcaaaagtgaaatgtgtcttcttgaaaccagcaagaaatagatgaattgagtgaaacgtgttgttattaggagaagtgggataacgtatacaaaaagaacttgcgatctgaatatgatctgaatatgagggtggataggaattttttgacagtgaaatctgttatgatgtagtctcatttccaagaaaagtcttgagttccatccccccttctgaatttaaattgaaacctggacagaaaacaaactatcctgtagtttccactgctcaggaggaaaaaaagaaatctatattatctaatgcatctttgccatctttattttctagaattctattagacttttcaattataggctattaggaaagaatataactcttagaattcccctaaatataattatcaactcatttgattaatatgcatattttttcccgtaagatttacaatacacgtgtgttttagtgaattaccaatggcttggagagaatgaaattggaataactaactgaaaaccctagatgtttgtagcattgagacccaatatctttttggaggccctctccatgttagcttattgtcaaattctggtgtgtaaacaaactccttgacccatgttaagttcagcatcctgcattttgttcatgaatcacattttaaaaggagaaaagctccacctggttttctttatttttttaaacagtgatttcaaagagaagataggcctttcataattgctaattatacatataggattaatagtcataaattatagtaaataaaacttgtacctattccttttataaatatgaattggctaggcacagtggctcacagctgtaatcccagcactttgggaggctgaggcgggcagatcacaaggtcaggtgtttgagactagcctggccaacatggcaaaaccctgtgtctactaaaaatacaaaaattagccaggcgtggtggcaggcacctgtaattccagctactcaggaagctggggcacgagaatcacttgaaccctggtggcagagtttgcagtgagctgagattgttccactgcattcctgggcactgcctgggtgacagaatgagactctgcctcaaaaaaaaaaaaagttattaaaaatagatatttaagattccaaaatgtagttgatccagtttgtttccctgtagcaagtagtgggatttgggtttcatgacatataattaaaatgttaatcacataactataatgccaacaattttctttatacatttttgtttaattatgttgacatatactttgtgttgtaccttatttcatgttactaaattttacataaagatgctggtctatttttatttaatcatatactgttatggtttgaatatagtttgttcctaccaaaactcatgttgaaattagattccccatgtgctagtgttgggaggcagagcctaatggaaggtgtttgggtcatgggggcagatagatcccacatgaataaactaatgccctcctactggggtgagtgagttctcattcttgctgtcgtgggaatggattagttctcacaagcaagggttactaaagagtctggctttcttgattttctcctttttgcctcctgccttcccatgtgatctctttgcacatacctactcccctttcactttgtaccaagagtggaagcaacatgagaccctcaccagatacagctgcccaatcttgagccttccagccaccagaatcatgagccaaataaaactctttttaaaaataagttacccagtcttagatattctattatagcgacacaaaatggactaagctgtactctgttgcattaaaatgtgttgtttatatgcaagtgacaaaaactcaaaatagtgtcagcatgaagggcagttcattggcttatatacagggaagtccaggcaatgactgggtcctgggtccaaacgtcaaaagcagtcatcttgccatcctacacacttggctctgattattttcttctttatggattggttttcttttcagattttccctttggggatattctgtatgggatgaggaacagtgaggtgagaggatggtggataacagcaattgacattttcagcttaccttagcataacaaggctgaaagcttttataaagcaagctatgtaaaattttggagaagtacttttattttgcccagattggatcacattccgttcctgagctaatcaagagaggaattcacccaaaggagggggaaatttttagaagaaagccagaatgtagggagcaggtgaggaaaggtagttactgggaatacgaaagtaacacattcattgcaccctgtttgaatttgagtagcaagaagtttctgatttgtactaacagaaggagtaaagttcagatttaatctgcaagtcttgattgtttttaactagagattttaatctcttcttcttattattgctgctttgagttgccattataggtttttggattttttttttaatgccatccatttttatttgacatcatgttgttgctagtttgagcagatgcacatagcatatgtttccattaccaatttggaaatttttcccagtggcatcagcatttgagagatactgattttgaaattagagtactaggggaaaatgcttcaaaaatgaagactacttaaataaaaattggctttaaataaacctttggggatctgtacttgactaaaaagtattttctttaaactttggtctttgaaaactaaagtgtgtgtgcatgtgttcattaaaatgacctataacatgaacattttccatactggagtgtgatgtactgtactcattttgaactttagaaccaaatgcatcctttagcatttgatgagctgctatataattctatttccagttttattttcttgccaaataaagtaccaaagctcagcctga

SEQ ID NO: 55 - DNA, 3038 bp, Homo Sapiens
ggcagaagaggaagatttctgaagagtgcagctgcctgaaccgagccctgccgaacagctgagaattgcactgcaaccatgagtgagaacaataagaattccttggagagcagcctacggcaactaaaatgccatttcacctggaacttgatggagggagaaaactccttggatgattttgaagacaaagtattttaccggactgagtttcagaatcgtgaattcaaagccacaatgtgcaacctactggcctatctaaagcacctcaaagggcaaaacgaggcagccctggaatgcttacgtaaagctgaagagttaatccagcaagagcatgctgaccaggcagaaatcagaagtctggtcacctggggaaactatgcctgggtctactatcacatgggccgactctcagacgttcagatttatgtagacaaggtgaaacatgtctgtgagaagttttccagtccctatagaattgagagtccagagcttgactgtgaggaagggtggacacggttaaagtgtggaggaaaccaaaatgaaagagcgaaggtgtgctttgagaaggctctggaaaagaagccaaagaacccagaattcacctctggactggcaatagcaagctaccgtctggacaactggccaccatctcagaacgccattgaccctctgaggcaagccattcggctgaatcctgacaaccagtaccttaaagtcctcctggctctgaagcttcataagatgcgtgaagaaggtgaagaggaaggtgaaggagagaagttagttgaagaagccttggagaaagccccaggtgtaacagatgttcttcgcagtgcagccaagttttatcgaagaaaagatgagccagacaaagcgattgaactgcttaaaaaggctttagaatacataccaaacaatgcctacctgcattgccaaattgggtgctgctatagggcaaaagtcttccaagtaatgaatctaagagagaatggaatgtatgggaaaagaaagttactggaactaataggacacgctgtggctcatctgaagaaagctgatgaggccaatgataatctcttccgtgtctgttccattcttgccagcctccatgctctagcagatcagtatgaagacgcagagtattacttccaaaaggaattcagtaaagagcttactcctgtagcgaaacaactgctccatctgcggtatggcaactttcagctgtaccaaatgaagtgtgaagacaaggccatccaccactttatagagggtgtaaaaataaaccagaaatcaagggagaaagaaaagatgaaagacaaactgcaaaaaattgccaaaatgcgactttctaaaaatggagcagattctgaggctttgcatgtcttggcattccttcaggagctgaatgaaaaaatgcaacaagcagatgaagactctgagaggggtttggagtctggaagcctcatcccttcagcatcaagctggaatggggaaagaatagagatgtggtgcccactaggctactgctgaaagggagctgaaattcctccaccaagttggtattcaaaatatgtaatgactggtatggcaaaagattggactaagacactggccataccactggacagggttatgttaacacctgaattgctgggtcttgagagagcccaaggagttctgggagagggaccagattggggggtaggtccacgggcttggtgatagaattatttctcgattgacttcttgagtgcaatttgaactgtaacatttgcttagtcacctttagtggagtaatctactgggcttgtttctatatttatataaagcagccaaatccttcatgtaatattgaagtccatttttgcaatgttgttccatacttggagtcattttgcatcccatagaggttagtcctgcatagccagtaatgtgctaagttcatccaaaagctggcggaccaaagtctaaatagggctcagtatcccccatcgcttatctctgcctccttcctcctccttcccagtctatcatcaaccttgagtattctacacaatgtgaattcaagtgcctgattaattgaggtggcaacatagtttgagacgagggcagagaacaggaagatacatagctagaagcgacgggtacaaaaagcaatgtgtacaagaagactttcagcaagtatacagagagttcacctctactctgccctcctcatagtcataatgtagcaagtaaagaatgagaatggattctgtacaatacactagaaaccaacataatgtatttctttaaaacctgtgtgaaaaaataaatgttccaccagtagggataggggaaaagtaaccaaaagagagaaagagaaaggaatgctggtttatctttgtagattgtaatcgaatggagaaatttgcagtattttagccactattaggaattttttttttttgtaaaatgaagactgaactctgttcaaatgctttcatgaacctggtttgagacggtaggaaagcaacaaaacgtgggaacctggtgactaagggcctggtgcaaggacttgggaaatgtcattgataatagatggtggggttttcccccctttagaaatgttggatattaagtgatataaacacttcttttaactccgaaaatcttctgagaaatcacaaaattcacggtatgcttggaacgattgagattttctaggtagatgctgaatagcctagacatcaaagttggtgtgaaccaaaatagagtcagctgacccagcatcagccacactctgggttggaaaatgtttgcctgttggaattaatttaagcttaagtatatatcaacattattttattgtgcaattaaaacaatacaaattcatggttttttaaagttaaaaattctaaccactgtaacaacagtttttgtgttattttctgtattaaacatcttgttgcacgcatttgaggtcatcagggtgcaaaatttgtattcctgaaaatgtcatatattttcattaataaataacctaaatatgataaaac

SEQ ID NO: 56 - DNA, 3511 bp, Homo Sapiens
agtagctgaggctgcggttccccgacgccacgcagctgcgcgcagctggttcccgctctgcagcgcaacgcctgaggcagtgggcgcgctcagtcccgggaccaggcgttctctcctctcgcctctgggcctgggaccccgcaaagcggcgatggagcggaggtcgcggaggaagtcgcggcgcaacgggcgctcgaccgcgggcaaggccgccgcgacccagcccgcgaagtctccgggcgcacagctctggctctttcccagcgccgcgggcctccaccgcgcgctgctccggagggtggaggtgacgcgccaactctgctgctcgccggggcgcctcgcggtcttggaacgcggcggggcgggcgtccaggttcaccagctgctcgccgggagcggcggcgcccggacgccgaaatgcattaaattaggaaaaaacatgaagatacattccgtggaccaaggagcagagcacatgctgattctctcatcagatggaaaaccatttgagtatgacaactatagcatgaaacatctaaggtttgaaagcattttacaagaaaaaaaaataattcagatcacatgtggagattaccattctcttgcactctcaaaaggtggtgagctttttgcctggggacagaacctgcatgggcagcttggagttggaaggaaatttccctcaaccaccacaccacagattgtggagcacctcgcaggagtacccttggctcagatttctgccggagaagcccacagcatggccttatccatgtctggcaacatttattcatggggaaaaaatgaatgtggacaactaggcctgggccacactgagagtaaagatgatccatcccttattgaaggactagacaatcagaaagttgaatttgtcgcttgtggtggctctcacagtgccctactcacacaggatgggctgctgtttactttcggtgctggaaaacatgggcaacttggtcataattcaacacagaatgagctaagaccctgtttggtggctgagcttgttgggtatagagtgactcagatagcatgtggaaggtggcacacacttgcctatgtttctgatttgggaaaggtcttttcctttggttctggaaaagatggacaactgggaaatggtggaacacgtgaccagctgatgccgcttccagtgaaagtatcatcaagtgaagaactcaaacttgaaagccatacctcagaaaaggagttaataatgattgctggagggaatcaaagcattttgctctggataaagaaagagaattcatatgttaatctgaagaggacaattcctactctgaatgaagggactgtaaagagatggattgctgatgtggagactaaacggtggcagagcacaaaaagggaaatccaagagatattttcatctcctgcttgtctaactggaagttttttaaggaaaagaagaactacagaaatgatgcctgtttatttggacttaaataaagcaagaaacatcttcaaggagttaacccaaaaggactggattactaacatgataaccacctgcctcaaagataatctgctcaaaagacttccatttcattctccaccccaagaagctttagaaattttcttccttctcccagaatgtcctatgatgcatatttccaacaactgggagagccttgtggttccatttgcaaaggttgtttgtaaaatgagtgaccagtcttcactggttctggaagagtattgggcaactctgcaagaatccactttcagcaaactggtccagatgtttaaaacagccgtcatatgccagttggattactgggatgaaagtgctgaggagaatggtaatgttcaagctctcctagaaatgttgaagaagctgcacagggtaaaccaggtgaaatgtcaactacctgaaagtattttccaagtagacgaactcttgcaccgtctcaatttttttgtagaagtatgcagaaggtacttgtggaaaatgactgtggacgcttcagaaaatgtacaatgctgcgtcatattcagtcactttccatttatctttaataatctgtcgaaaattaaactactacatacagacacacttttaaaaatagagagtaaaaaacataaagcttatcttaggtcggcagcaattgaggaagaaagagagtctgaattcgctttgaggcccacgtttgatctaacagtcagaaggaatcacttgattgaggatgttttgaatcagctaagtcaatttgagaatgaagacctgaggaaagagttatgggtttcatttagtggagaaattgggtatgacctcggaggagtcaagaaagagttcttctactgtctgtttgcagagatgatccagccggaatatgggatgttcatgtatcctgaaggggcttcctgcatgtggtttcctgtcaagcctaaatttgagaagaaaagatacttcttttttggggttctatgtggactttccctgttcaattgcaatgttgccaaccttcctttcccactggcactgtttaagaaacttttggaccaaatgccatcattggaagacttgaaagaactcagtcctgatttgggaaagaatttgcaaacacttctggatgatgaaggtgataactttgaggaagtattttacatccattttaatgtgcactgggacagaaacgacacaaacttaattcctaatggaagtagcataactgtcaaccagactaacaagagagactatgtttctaagtatatcaattacattttcaacgactctgtaaaggcggtttatgaagaatttcggagaggattttataaaatgtgcgacgaagacattatcaaattattccaccccgaagaactgaaggatgtgattgttggaaatacagattatgattggaaaacatttgaaaagaatgcacgttatgaaccaggatataacagttcacatcccaccatagtgatgttttggaaggctttccacaaattgactctggaagaaaagaaaaaattccttgtatttcttacaggaactgacagactacaaatgaaagatttaaataatatgaaaataacattttgctgtcctgaaagttggaatgaaagagaccctataagagcactgacatgtttcagtgtcctcttcctccctaaatattctacaatggaaacagttgaagaagcgcttcaagaagccatcaacaacaacagaggatttggctgaccagcttgcttgtccaacagccttattttgttgttgttatcgttgttgttgttgttgttgttgttgtttctctactttgttttgttttaggcttttagcagcctgaagccatggtttttcatttctgtctctagtgataagcaggaaagagggatgaagaagagggtttactggccggttagaacccgtgactgtattctctcccttggatacccctatgcctacatcatattccttacctcttttgggaaatatttttcaaaaataaaataaccgaaaaattaa

SEQ ID NO: 57 - DNA, 1716 bp, Homo Sapiens
cgcttctgccctggccctctgcgggccgctccgccggtgctgtccctgggcgcctccgtgctctcagccaaccacctctgagagcgcccactcgagcgccccgggagccagagggcgggggtcctcgccgggaccctcctgtgggcccagggggacaaaagtggctctcaatccagcacatgcacattgaagcaagttaaaggatttaatatgaagcacagaagcagatagtgccaaatagcaagcagtagttgttacacatttggtgagcagggcagcatttccttctcccactgctgctgagatggcagaaattagtcgaattcagtacgaaatggaatatactgaaggcattagtcagcgaatgagggtcccagaaaagttaaaagtagcaccgccaaacgctgacctggaacaaggattccaagaaggagttccaaatgctagtgtgataatgcaagttccggagaggattgttgtagcaggaaataatgaagatgtttcattttcaagaccagcagatcttgaccttattcagtcaactccctttaaacccctggcactgaaaacaccacctcgtgtacttacgctgagtgaaagaccactagattttctggatttagaaagacctcctacaacccctcaaaatgaagaaatccgagcagttggcagactaaaaagagagcggtctatgagtgaaaatgctgttcgccaaaatggacagctggtcagaaatgattctctacctgtgttgcgtggtgggtctgctgccgccacttctaatcctcatcatgacaacgtcaggtatggcatttcaaatatagatacaaccattgaaggaacgtcagatgacctgactgttgtagatgcagcttcactaagacgacagataatcaaactaaatagacgtctacaacttctggaagaggagaacaaagaacgtgctaaaagagaaatggtcatgtattcaattactgtagctttctggctgcttaatagctggctctggtttcgccgctagaggtaacatcagccctcaaaaatactgtctcaacagctggaaatataaaagatttgcaaacttctttgtttctgtctctgcattgtatgccattttatagtccacaccctgaaaatgtatttcttccagaaagtctggaggaaggacctatatttgtagaagtaaaggtatattctgtcactcagctgtattcacgtctgagcagttctgcagtaacacctgcttaaaattctccctttgcatgttttgtaaataggctccagttttgttttttaaaaggaatttattttttgcctcatcagtccacccaactgattctgaatgggagagagtctgtagagaattgattcagaaaagtgtctgtgaaagaaaaacaattattttgtcctgtttctcaaacagtgttaagcagttttgttaatagacatttttgcatcgacacttcaacattaacactttcaaagtcatggtctggtgccagatttaagaaactcgaaccacctaatatttcataaccttcttcattaggtacttgtacagattaatttctaacattgcagcagtttcatatgtgtgcaatatgtgcattctttcattttagttttgcacttggttttctataaagtacgtttttactcagttcatgcgtgaacaatttaaaaaacgacagaataaggtacaaatgtagtgtattt

SEQ ID NO: 58 - DNA, 3543 bp, Homo Sapiens
agagcgcggcggagcggagcgccaggcagcgcggagcggaggccaggcccacagccgctccgcctcccggcccgcagatccccgacggccgcaccgcgggctcctctggcccgcaagaacacgtgcatggcgtcctggggaaggcgctgagtgcggagtcgcggcgccgcacgcggcaccatggccctggagcaggcgctgcaggcggcgcggcagggcgagctggacgtgctgaggtcgctgcacgccgcaggcctcctggggccctcgctgcgcgacccgctggacgcgctgcccgtgcaccacgcggcccgcgctgggaagctgcactgtctgcgcttcctggtggaggaagccgccctccccgccgcggcccgcgcccgcaacggcgccacaccggcccacgacgcctccgccaccggccacctcgcctgcctgcagtggctgctgtcgcagggcggctgcagagtgcaggacaaagacaattctggtgccacagtcttgcatctggctgcccgcttcggccaccccgaggtggtgaactggctcttgcatcatggcggtggggaccccaccgcggccacagacatgggcgccctgcctatccactacgctgccgccaaaggagacttcccctccctgaggcttctcgtcgagcactaccctgagggagtgaatgcccaaaccaagaacggtgccacgcccctgtacctggcgtgccaggagggccacctggaggtgacccagtacctggtgcaggaatgcggcgcagacccgcacgcgcgcgcccacgacggcatgaccccgctgcacgccgcggcgcagatgggccacagcccagtcatcgtgtggttggtgagctgcaccgacgtgagcctgtccgagcaggacaaagacggcgccaccgccatgcacttcgcggcgagccgcggccacaccaaggtgctcagctggctgctgctgcacggcggggagatctcggctgacctgtggggcgggaccccgctgcacgacgccgccgagaacggggagctagagtgctgccagatcctggtagtgaacggcgcggagctggacgtccgcgaccgcgacgggtacacggccgccgacctgtcggacttcaacggccacagccactgcacccgctacctgcgcacggtggagaacctgagcgtggagcaccgcgtgctttcccgggatccatccgcagagctggaggctaagcagccggattcaggcatgtcctcacccaataccacggtgtcggtccagccgctgaactttgacctcagctcgcctaccagcaccctctccaactacgactcctgctcctccagccactccagcatcaagggccagcaccctccatgtgggctttccagcgctagagctgcagacatacagagctacatggacatgctgaacccggagctgggcctgcctcggggcacgattgggaagcccacacccccaccacccccacccagcttccccccgccacccccgcccccaggcacccaactgcccccacccccacctggctacccagctcccaagcctcctgtaggaccacaggcagctgacatctacatgcagaccaagaacaaactccgccacgtggagacagaggccctcaagaaggagctgagctcctgtgacggccacgacgggctgcggaggcaggactccagccgcaagccccgcgccttcagcaagcagcccagcacgggggactactaccggcagctgggccgctgccccggcgagacgctggccgcacgcccgggcatggcgcacagcgaggaggtgcgtgcccgccagcccgcgcgcgccggctgcccgcgcctcggccctgccgcccgcggctcactcgaaggcccctccgctcccccgcaggcggcgctgcttcctgggaaccatgttcctaacggctgcgccgcggaccccaaggcgtccagggagctgccaccgccgcccccaccgccgccgccgcccctgccggaggccgcgagttcgccaccgccggccccgcctctgcccctcgagagcgctggccctggctgcgggcagcgccgctcctcctcgtccaccggcagcaccaagtctttcaacatgatgtccccgacgggcgacaactcggagctactggctgagattaaggcaggcaagagcctgaagccgacgccccagagcaaggggctgaccacagtgttctcaggcatcgggcagccggccttccagcccgattcgccgctgccttctgtgtcacctgcactgtcaccagtccggagccccacaccgccagctgcggggtttcagccgctgctcaatggaagcttggttcccgtgccgcccactactcctgcgccgggagtgcagctggacgtggaggctctcatccccacgcacgatgagcagggccggcccatccccgagtggaagcgccaggtgatggtgcgcaagatgcagctgaagatgcaggaggaggaggagcagaggcggaaggaggaggaggaggaggcccggctggccagcatgcccgcctggaggcgggacctcctgcggaagaagctggaagaagagagggagcagaagcggaaagaggaggagcgacagaagcaggaggagctgcggcgggagaaggaacagtcagagaagctgcggacgctgggctacgatgagagcaagctggcgccctggcagcgacaggtcatcctgaagaagggggacatcgctaagtactagaggccgcagactcctgtccgcagcctcgcagctccgtggggccctccgccccagccccagccagccaggccctggtggaaaggctgggagccgcacagccctcccctcctgcgctggaaaccctccctgacccccaccctggccccccgtatccccagcccttggcaacactggagtgcacacgccgccacggttgcccagaaaaagtgcccaagctgctgacgcaaacaacaacaaatgctgcttatttgcatgccgacttacatatatttgcatgttcgttgactatcaaagagtgcagagctctccccagccccgtgggtggtgactttgttttcctgcggggctcagccccctccaggatgcagccccctcccccgcaccccggaaccggcgtcgctggcgcatcctgggtggaggcaggccccgagctcggggaaggggttttcccttcctctctgacccagatctgcgcgcggcctagcccgggcctcatttcttatccccgccaagggtttcctctcagtcatttgtttaccagaaacatgaaaactgcctgtctggccgggccgcacttgtggcccccgggaccccacctctggccccacctccctcaagtctgcgccccgtccccagccagacccactcgctgccgggaccctttcactgccccggtggagtgaatagaggatgaggggccctgaccctgtgtctccaactgctgcaccccatcccgaccctgtctccgccacctcgcagccccattaaagcgctctcatctgggctccggttcactca

SEQ ID NO: 59 - DNA, 3159 bp, Homo Sapiens
attccaagtcgctgctgtgcagagcagcaagtgctccgtgcagggctgttgctatcacttggaggtgaacagcctcttttgccggtattcagtgaagaaagcaagtctaaatatgcagttctctcactggagtgaaagatgttttgttcatttctaatcaactatgctagacagctgcaagctgaaaagtgcctgcaatttgccatttatttgtaataagaaaataataaacactgctggaaccagtaatgcagaagtccccttggctgatcccggaatgtaccagctggacattacattaagaaggggtcaaagtttagctgctcgagatcgaggagggacgagtgatccatatgtgaagtttaaaatcggaggaaaagaagtttttagaagtaagataatacacaagaacctcaaccctgtgtgggaagaaaaagcttgtattctggttgatcatcttagggagccattgtatataaaggtatttgactatgattttggactacaggatgactttatgggctcagcctttctggatctgacacaattggagttaaacaggcccacagatgtgacccttactctgaaagatcctcattatcctgaccatgatcttggaatcattttgctctcagtcatccttacccctaaagaaggagagtccagggatgtgacaatgctaatgaggaagagttggaaaagatcaagtaagtttcagacccaaagtttacgcctatcagacctacacagaaaatcgcatctttggagaggaatagtcagcatcaccttgattgaagggagagacctcaaggccatggattccaacgggttgagcgatccctacgtgaagttccggcttgggcatcagaagtacaagagcaagattatgccaaaaacgttgaatcctcagtggagggaacaatttgattttcacctttatgaagaaagaggaggagtcattgatatcactgcatgggacaaagatgctgggaaaagggatgatttcattggcaggtgccaggtcgacctgtcagccctcagtagggaacagacgcacaagctggagttgcagctggaagagggtgagggacacctggtgctgctggtcactctgacagcatcagccacagtcagcatctctgacctgtctgtcaactccctggaggaccagaaggaacgagaggagatattaaagagatatagcccattgaggatatttcacaacctgaaagatgtgggatttctccaggtgaaagtcatcagagcggaagggttaatggctgccgacgtcactggaaaaagtgacccattttgtgtggtagaactgaacaacgatagactgctaacacatactgtctacaaaaatctcaatcctgagtggaataaagtcttcacgttcaacattaaagatatccattcagttcttgaagtgacagtttatgatgaagatcgggatcgaagtgctgactttctgggcaaagttgctataccattgctgtctattcaaaatggtgaacagaaagcctacgtcttgaaaaacaagcagctgacagggccaacaaagggggtcatctatcttgaaatagatgtgatttttaatgctgtgaaagccagcttacgaacattaatacccaaagaacagaagtacattgaagaggaaaacagactctctaaacagctgctactaagaaactttatcagaatgaaacgttgtgtcatggtgctggtaaatgctgcatactacgttaatagttgctttgattgggattcacccccaaggagtctcgctgcttttgtggtagtggaggacatgctagaggacgaggaagaagaagatgacaaagatgacaaggacagtgaaaaaaagggatttataaataaaatctatgccatccaggaggtatgtgtcagtgtccagaacatcctagatgaagtggcttcctttggcgaaaggataaagaatactttcaactggactgtcccattcttaagctggctggccattgtagccctctgtgtgttcacagccatcctgtactgcattccgctgagatacattgtccttgtctggggcatcaataaatttacaaaaaagcttcggagtccatatgcaattgataacaatgaactacttgacttcctttccagagtcccttcagatgtacaagtggtgcaataccaagaactgaaaccagatccttctcatagcccatataaaagaaagaaaaacaatcttggctagccagctcccagcactgaggagaccagcatctgtttgggaagataaaagaaaaagccctcagcctcagcagcatttcctttctttctgctttttatttattttgcctttttatcatgatcgagagaatctgtaaatagtgtacaaaggcatatgtctttgaatatatacttctattgtacagactcaacttgataaaggttttgctactgctgtgtcaaaaccttgttagctgtggataataatataacacactgaaagaacaaatataagaatgataacactggaagatatattcttatctaattactagtggattaaatactcacctgtgctctgattaaatctacatcaattgtaaatgtcgatttgattttaaagtttttttttaatgcgactattttttatctgaaaagtaatccattacacttttctatgttttatacatttcaaaagggagggaaattccaaagcctgaataatggaatggatacatttcaatttaacatatattctggctttagatcccgacattcactcctgtgcaaattacttaggtatgacttaggctaattttaagctaataagtgaaggtacattcactccctcaagagaatcaatactcagaaggttacaaagttttctttatagaatttcaatcaatcattccatctaaaaccttaaaatctctacaggactacataacataaatactgccagtttataaacgattgcctatctgaatttttatacctaccactactttaatttatacagttagttagcaaattagcaacccagtaagtacagttatcaaaaatactaggaaactatatccatatcgcttttggtgtcagattgtatctgtgcatctaaaaatattttaataaatactcaagtgctctcagagaaaaaaaaaa

SEQ ID NO: 60 - DNA, 2266 bp, Homo Sapiens
ccggccggcgcccaaggacaaatggagcaacttcgaccccaccggcctggagcgcgccgccaaggcggcgcgcgagctggagcactcgcgttatgccaaggacgccctgaatctggcacagatgcaggagcagacgctgcagttggagcaacagtccaagctcaaagagtatgaggccgccgtggagcagctcaagagcgagcagatccgggcgcaggctgaggagaggaggaagaccctgagcgaggagacccggcagcaccaggccagggcccagtatcaagacaagctggcccggcagcgctacgaggaccaactgaagcagcagcaacttctcaatgaggagaatttacggaagcaggaggagtccgtgcagaagcaggaagccatgcggcgagtgctgggattacaggcgtgagcctctgcgttctgcctagaacatgggtctttactgtcctggtttcagtggggatcacagccaccgtggagcgggagatggagctgcggcacaagaatgagatgctgcgagtggaggccgaggcccgggcgcgcgccaaggccgagcgggagaatgcagacatcatccgcgagcagatccgcctgaaggcggccgagcaccgtcagaccgtcttggagtccatcaggacggctggcaccttgtttggggaaggattccgtgcctttgtgacagactgggacaaagtgacagccacggtggctgggctgacgctgctggctgttggggtctactcagccaagaatgccacgcttgtcgccggccgcttcatcgaggctcggctggggaagccgtccctagtgagggagacgtcccgcatcacggtgcttgaggcgctgcggcaccccatccaggtcagccggcggctcctcagtcgaccccaggacgcgctggagggtgttgtgctcagtcccagcctggaagcacgggtgcgcgacatcgccatagcaacaaggaacaccaagaagaaccgcagcctgtacaggaacatcctgatgtacgggccaccaggcaccgggaagacgctgtttgccaagaaactcgccctgcactcaggcatggactacgccatcatgacaggcggggacgtggcccccatggggcgggaaggcgtgaccgccatgcacaagctctttgactgggccaataccagccggcgcggcctcctgctctttgtggatgaagcggacgccttccttcggaagcgagccaccgagaagataagcgaggacctcagggccacactgaacgccttcctgtaccgcacgggccagcacagcaacaagttcatgctggtcctggccagcaaccaaccagagcagttcgactgggccatcaatgaccgcatcaatgagatggtccacttcgacctgccagggcaggaggaacgggagcgcctggtgagaatgtattttgacaagtatgttcttaagccggccacagaaggaaagcagcgcctgaagctggcccagtttgactacgggaggaagtgctcggaggtcgctcggctgacggagggcatgtcgggccgggagatcgctcagctggccgtgtcctggcaggccacggcgtatgcctccgaggacggggtcctgaccgaggccatgatggacacccgcgtgcaagatgctgtccagcagcaccagcagaagatgtgctggctgaaggcggaagggcctgggcgtggggacgagccctccccatcctgagtccacagggagatccacagctcacggagcctggccgcggacccctcccacccctgccttgccggcccctgcacatttaggatatgctcctgggtggggactgggctgtgcccagggcctctgtcccccaggatgtcttgtggtgcgggtcggccgttctgccccccagggcaccccctgttgtaggcactggctagggaggggcaggcctccttcctgcccctcgagacactcttgggagatgcattttccgtctggctcacagggggagggtgaggctttgcaccccagcccctgcccaggccactgtgagggtgggtgctggctgagcccccggggcagcaggagccaggcaggtgatgtctttgttctcggctcccacagcagagccaggtgagggggcgcctgccagggccagacccaggtggggcagcctgaaccctgcttccccctgtggccggcatgccccgatctttcacacactggtgaccctgagagaggagggaggagggaacctggcgggggtgtctgaggccgcact

SEQ ID NO: 61 - DNA, 1946 bp, Homo Sapiens
acagagacctcgcaggccccgagaactgtcgcccttccacgatgtggctccgtgcctttatcctggccactctctctgcttccgcggcttgggcagggcatccgtcctcgccacctgtggtggacaccgtgcatggcaaagtgctggggaagttcgtcagcttagaaggatttgcacagcctgtggccattttcctgggaatcccttttgccaagccgcctcttggacccctgaggtttactccaccgcagcctgcagaaccatggagctttgtgaagaatgccacctcgtaccctcctatgtgcacccaagatcccaaggcggggcagttactctcagagctatttacaaaccgaaaggagaacattcctctcaagctttctgaagactgtctttacctcaatatttacactcctgctgacttgaccaagaaaaacaggctgccggtgatggtgtggatccacggaggggggctgatggtgggtgcggcatcaacctatgatgggctggcccttgctgcccatgaaaacgtggtggtggtgaccattcaatatcgcctgggcatctggggattcttcagcacaggggatgaacacagccgggggaactggggtcacctggaccaggtggctgccctgcgctgggtccaggacaacattgccagctttggagggaacccaggctctgtgaccatctttggagagtcagcgggaggagaaagtgtctctgttcttgttttgtctccattggccaagaacctcttccaccgggccatttctgagagtggcgtggccctcacttctgttctggtgaagaaaggtgatgtcaagcccttggctgagcaaattgctatcactgctgggtgcaaaaccaccacctctgctgtcatggttcactgcctgcgacagaagacggaagaggagctcttggagacgacattgaaaatgaaattcttatctctggacttacagggagaccccagagagagtcaaccccttctgggcactgtgattgatgggatgctgctgctgaaaacacctgaagagcttcaagctgaaaggaatttccacactgtcccctacatggtcggaattaacaagcaggagtttggctggttgattccaatgcagttgatgagctatccactctccgaagggcaactggaccagaagacagccatgtcactcctgtggaagtcctatccccttgtttgcattgctaaggaactgattccagaagccactgagaaatacttaggaggaacagacgacactgtcaaaaagaaagacctgttcctggacttgatagcagatgtgatgtttggtgtcccatctgtgattgtggcccggaaccacagagatgctggagcacccacctacatgtatgagtttcagtaccgtccaagcttctcatcagacatgaaacccaagacggtgataggagaccacggggatgagctcttctccgtctttggggccccatttttaaaagagggtgcctcagaagaggagatcagacttagcaagatggtgatgaaattctgggccaactttgctcgcaatggaaaccccaatggggaagggctgccccactggccagagtacaaccagaaggaagggtatctgcagattggtgccaacacccaggcggcccagaagctgaaggacaaagaagtagctttctggaccaacctctttgccaagaaggcagtggagaagccaccccagacagaacacatagagctgtgaatgaagatccagccggccttgggagcctggaggagcaaagactggggtcttttgcgaaagggattgcaggttcagaaggcatcttaccatggctggggaattgtctggtggtggggggcaggggacagaggccatgaaggagcaagttttgtatttgtgacctcagctttgggaataaaggatcttttgaaggccaaa

SEQ ID NO: 62 - DNA, 364 bp, Homo Sapiens
gcttaagacggtgaggtcagcttcacattctcaggaactctccttctttgggccacggaattaacccgagcaggcatggaggcctctgctctcacctcatcagcagtgaccagtgtggccaaagtggtcagggtggcctctggctctgccgtagttttgcccctggccaggattgctacagttgtgattggaggagttgtggccatggcggctgtgcccatggtgctcagtgccatgggcttcactgcggcgggaatcgcctcgtcctccatagcagccaagatgatgtccgcggcggccattgccaatgggggtggagttgcctcgggcagccttgtggctactctgcagtcactgggagcaa

SEQ ID NO: 63 - DNA, 466 bp, Homo Sapiens
gcattggggacttgactctggaaagcgtccagaccaaggccgtcgctttcgggttctctcatcgcttcgtcgttcgccaatgtttgaggagaaggccagcagtccttcagggaagatgggaggcgaggagaagccgattggtgctggtgaagagaagcaaaaggaaggaggcaaaaagaagaacaaagaaggatctggagatggaggtcgagctgagttgaatccttggcctgaatatatttacacacgtcttgagatgtataatatactaaaagcagaacatgattccattctggcagaaaaggcagaaaaagatagcaagccaattaaagtcactttgcctgatggtaaacaggttgatgcggaatcttggaaaactacaccatatcaaattgcctgtggaattagtcaaggcctggccgacaacaccgttattgctaaagtaaataatgttgtgtgggacctg

SEQ ID NO: 64 - DNA, 2455 bp, Homo Sapiens
tttcctttcccctttcataaaagcacagacctaacagcaccctgggtggaaacctcttcagcatttgcttggaatcagtaagctaaaaacaaaatcaaccgggaccccagcttttcagaactgcagggaaacagccatcatgagtgaggtcaccaagaattccctggagaaaatccttccacagctgaaatgccatttcacctggaacttattcaaggaagacagtgtctcaagggatctagaagatagagtgtgtaaccagattgaatttttaaacactgagttcaaagctacaatgtacaacttgttggcctacataaaacacctagatggtaacaacgaggcagccctggaatgcttacggcaagctgaagagttaatccagcaagaacatgctgaccaagcagaaatcagaagtctagtcacttggggaaactacgcctgggtctactatcacttgggcagactctcagatgctcagatttatgtagataaggtgaaacaaacctgcaagaaattttcaaatccatacagtattgagtattctgaacttgactgtgaggaagggtggacacaactgaagtgtggaagaaatgaaagggcgaaggtgtgttttgagaaggctctggaagaaaagcccaacaacccagaattctcctctggactggcaattgcgatgtaccatctggataatcacccagagaaacagttctctactgatgttttgaagcaggccattgagctgagtcctgataaccaatacgtcaaggttctcttgggcctgaaactgcagaagatgaataaagaagctgaaggagagcagtttgttgaagaagccttggaaaagtctccttgccaaacagatgtcctccgcagtgcagccaaattttacagaagaaaaggtgacctagacaaagctattgaactgtttcaacgggtgttggaatccacaccaaacaatggctacctctatcaccagattgggtgctgctacaaggcaaaagtaagacaaatgcagaatacaggagaatctgaagctagtggaaataaagagatgattgaagcactaaagcaatatgctatggactattcgaataaagctcttgagaagggactgaatcctctgaatgcatactccgatctcgctgagttcctggagacggaatgttatcagacaccattcaataaggaagtccctgatgctgaaaagcaacaatcccatcagcgctactgcaaccttcagaaatataatgggaagtctgaagacactgctgtgcaacatggtttagagggtttgtccataagcaaaaaatcaactgacaaggaagagatcaaagaccaaccacagaatgtatctgaaaatctgcttccacaaaatgcaccaaattattggtatcttcaaggattaattcataagcagaatggagatctgctgcaagcagccaaatgttatgagaaggaactgggccgcctgctaagggatgccccttcaggcataggcagtattttcctgtcagcatctgagcttgaggatggtagtgaggaaatgggccagggcgcagtcagctccagtcccagagagctcctctctaactcagagcaactgaactgagacagaggaggaaaacagagcatcagaagcctgcagtggtggttgtgacgggtaggacgataggaagacagggggccccaacctgggattgctgagcagggaagctttgcatgttgctctaaggtacatttttaaagagttgttttttggccgggcgcagtggctcatgcctgtaatcccagcactttgggaggccgaggtgggcggatcacgaggtctggagtttgagaccatcctggctaacacagtgaaatcccgtctctactaaaaatacaaaaaattagccaggcgtggtggctggcacctgtagtcccagctacttgggaggctgaggcaggagaatggcgtgaacctggaaggaagaggttgcagtgagccaagattgcgcccctgcactccagcctgggcaacagagcaagactccatctcaaaaaaaaaaaaaaaaaaaaaaaagagttgttttctcatgttcattatagttcattacagttacatagtccgaaggtcttacaactaatcactggtagcaataaatgcttcaggcccacatgatgctgattagttctcagttttcattcagttcacaatataaccaccattcctgccctccctgccaagggtcataaatggtgactgcctaacaacaaaatttgcagtctcatctcattttcatccagacttctggaactcaaagattaacttttgactaaccctggaatatctcttatctcacttatagcttcaggcatgtatttatatgtattcttgatagcaataccataatcaatgtgtattcctgatagtaatgctacaataaatccaaacatttcaactctgttagaa

SEQ ID NO: 65 - DNA, 1496 bp, Homo Sapiens
gatgctgaagggataacgggaacgcagcggcaggatggaagagacaggcactgcgctgcggaatgcctgggaggaaaagggggagacctttcatccaggatgagggacatttaagatgaaatgtccgtggcaggatcgtttctcttcactgctgcatgcggcactgggaactcgccccacctgtgtccggaacctgctcgctcacgtcggctttccccttctgttttgttctaggacttctgcacggacctggccgtctccagtgccaacttcattcccacggtcactgccatctcgaccagtccggacctgcagtggctggtgcagcccgccctcgtctcctccgtggccccatcgcagaccagagcccctcaccctttcggagtccccgccccctccgctggggcttactccagggctggcgttgtgaagaccatgacaggaggccgagcgcagagcattggcaggaggggcaaggtggaacagttatctccagaagaagaagagaaaaggagaatccgaagggaaaggaataagatggctgcagccaaatgccgcaaccggaggagggagctgactgatacactccaagcggagacagaccaactagaagatgagaagtctgctttgcagaccgagattgccaacctgctgaaggagaaggaaaaactagagttcatcctggcagctcaccgacctgcctgcaagatccctgatgacctgggcttcccagaagagatgtctgtggcttcccttgatctgactgggggcctgccagaggttgccaccccggagtctgaggaggccttcaccctgcctctcctcaatgaccctgagcccaagccctcagtggaacctgtcaagagcatcagcagcatggagctgaagaccgagccctttgatgacttcctgttcccagcatcatccaggcccagtggctctgagacagcccgctccgtgccagacatggacctatctgggtccttctatgcagcagactgggagcctctgcacagtggctccctggggatggggcccatggccacagagctggagcccctgtgcactccggtggtcacctgtactcccagctgcactgcttacacgtcttccttcgtcttcacctaccccgaggctgactccttccccagctgtgcagctgcccaccgcaagggcagcagcagcaatgagccttcctctgactcgctcagctcacccacgctgctggccctgtgagggggcagggaaggggaggcagccggcacccacaagtgccactgcccgagctggtgcattacagagaggagaaacacatcttccctagagggttcctgtagacctagggaggaccttatctgtgcgtgaaacacaccaggctgtgggcctcaaggacttgaaagcatccatgtgtggactcaagtccttacctcttccggagatgtagcaaaacgcatggagtgtgtattgttcccagtgacacttcagagagctggtag

SEQ ID NO: 66 - DNA, 3581 bp, Homo Sapiens
caaactctgtaagaactgcctgacagaaagctggactcaaagctcctacccgagtgtgcagcaggatcgccccggtccgggaccccaggcgcacaccgcagagtccaaagtgccgcgcctgccggccgcacctgcctgccgcggccccgcgcgccgccccgctgcccacctgcccgcctgcccacctgcccaggtgcgagtgcagccccgcgcgccggcctgagagccctgtggacaacctcgtcattgtcaggcacagagcggtagaccctgcttctctaagtgggcagcggacagcggcacgcacatttcacctgtcccgcagacaacagcaccatctgcttgggagaaccctctcccttctctgagaaagaaagatgtcgaatgggtattccacagacgagaatttccgctatctcatctcgtgcttcagggccagggtgaaaatgtacatccaggtggagcctgtgctggactacctgacctttctgcctgcagaggtgaaggagcagattcagaggacagtcgccacctccgggaacatgcaggcagttgaactgctgctgagcaccttggagaagggagtctggcaccttggttggactcgggaattcgtggaggccctccggagaaccggcagccctctggccgcccgctacatgaaccctgagctcacggacttgccctctccatcgtttgagaacgctcatgatgaatatctccaactgctgaacctccttcagcccactctggtggacaagcttctagttagagacgtcttggataagtgcatggaggaggaactgttgacaattgaagacagaaaccggattgctgctgcagaaaacaatggaaatgaatcaggtgtaagagagctactaaaaaggattgtgcagaaagaaaactggttctctgcatttctgaatgttcttcgtcaaacaggaaacaatgaacttgtccaagagttaacaggctctgattgctcagaaagcaatgcagagattgagaatttatcacaagttgatggtcctcaagtggaagagcaacttctttcaaccacagttcagccaaatctggagaaggaggtctggggcatggagaataactcatcagaatcatcttttgcagattcttctgtagtttcagaatcagacacaagtttggcagaaggaagtgtcagctgcttagatgaaagtcttggacataacagcaacatgggcagtgattcaggcaccatgggaagtgattcagatgaagagaatgtggcagcaagagcatccccggagccagaactccagctcaggccttaccaaatggaagttgcccagccagccttggaagggaagaatatcatcatctgcctccctacagggagtggaaaaaccagagtggctgtttacattgccaaggatcacttagacaagaagaaaaaagcatctgagcctggaaaagttatagttcttgtcaataaggtactgctagttgaacagctcttccgcaaggagttccaaccatttttgaagaaatggtatcgtgttattggattaagtggtgatacccaactgaaaatatcatttccagaagttgtcaagtcctgtgatattattatcagtacagctcaaatccttgaaaactccctcttaaacttggaaaatggagaagatgctggtgttcaattgtcagacttttccctcattatcattgatgaatgtcatcacaccaacaaagaagcagtgtataataacatcatgaggcattatttgatgcagaagttgaaaaacaatagactcaagaaagaaaacaaaccagtgattccccttcctcagatactgggactaacagcttcacctggtgttggaggggccacgaagcaagccaaagctgaagaacacattttaaaactatgtgccaatcttgatgcatttactattaaaactgttaaagaaaaccttgatcaactgaaaaaccaaatacaggagccatgcaagaagtttgccattgcagatgcaaccagagaagatccatttaaagagaaacttctagaaataatgacaaggattcaaacttattgtcaaatgagtccaatgtcagattttggaactcaaccctatgaacaatgggccattcaaatggaaaaaaaagctgcaaaagaaggaaatcgcaaagaacgtgtttgtgcagaacatttgaggaagtacaatgaggccctacaaattaatgacacaattcgaatgatagatgcgtatactcatcttgaaactttctataatgaagagaaagataagaagtttgcagtcatagaagatgatagtgatgagggtggtgatgatgagtattgtgatggtgatgaagatgaggatgatttaaagaaacctttgaaactggatgaaacagatagatttctcatgactttattttttgaaaacaataaaatgttgaaaaggctggctgaaaacccagaatatgaaaatgaaaagctgaccaaattaagaaataccataatggagcaatatactaggactgaggaatcagcacgaggaataatctttacaaaaacacgacagagtgcatatgcgctttcccagtggattactgaaaatgaaaaatttgctgaagtaggagtcaaagcccaccatctgattggagctggacacagcagtgagttcaaacccatgacacagaatgaacaaaaagaagtcattagtaaatttcgcactggaaaaataaatctgcttatcgctaccacagtggcagaagaaggtctggatattaaagaatgtaacattgttatccgttatggtctcgtcaccaatgaaatagccatggtccaggcccgtggtcgagccagagctgatgagagcacctacgtcctggttgctcacagtggttcaggagttatcgaacatgagacagttaatgatttccgagagaagatgatgtataaagctatacattgtgttcaaaatatgaaaccagaggagtatgctcataagattttggaattacagatgcaaagtataatggaaaagaaaatgaaaaccaagagaaatattgccaagcattacaagaataacccatcactaataactttcctttgcaaaaactgcagtgtgctagcctgttctggggaagatatccatgtaattgagaaaatgcatcacgtcaatatgaccccagaattcaaggaactttacattgtaagagaaaacaaagcactgcaaaagaagtgtgccgactatcaaataaatggtgaaatcatctgcaaatgtggccaggcttggggaacaatgatggtgcacaaaggcttagatttgccttgtctcaaaataaggaattttgtagtggttttcaaaaataattcaacaaagaaacaatacaaaaagtgggtagaattacctatcacatttcccaatcttgactattcagaatgctgtttatttagtgatgaggattagcacttgattgaagattcttttaaaatactatcagttaaacatttaatatgattatgattaatgtattcattatgctacagaactgacataagaatcaataaaatgattgttttactctgcattgaa

SEQ ID NO: 67 - DNA, 838 bp, Homo Sapiens
ctcgatgcttctctgagcctaagggtttccgccactcgttcaccctccccccagctcatgatcctcctccctcccccgccctcctggtccaatctccgatctgtttagtaagaaggcgcctgtgtctggcagagctggtgtgagacgagacaatcctgccccgccgccgggataatcaagagttttggccggacctttgagcatacaccgagagagtgaggagccagacgacaagcacacactatggcgctgaaacggattaataaggaacttagtgatttggcccgtgaccctccagcacaatgttctgcaggtccagttggggatgatatgtttcattggcaagccacaattatgggacctaatgacagcccatatcaaggcggtgtattctttttgacaattcattttcctacagactaccccttcaaaccacctaaggttgcatttacaacaagaatttatcatccaaatattaacagtaatggcagcatttgtctcgatattctaagatcacagtggtcgcctgctttaacaatttctaaagttcttttatccatttgttcactgctatgtgatccaaacccagatgaccccctagtgccagagattgcacggatctataaaacagacagagataagtacaacagaatatctcgggaatggactcagaagtatgccatgtgatgctaccttaaagtcagaataacctgcattatagctggaataaactttaaattactgttccttttttgattttcttatccggctgctcccctatcagacctcatcttttttaattttattttttgtttacctccctccattcattcacatg

SEQ ID NO: 68 - DNA, 1706 bp, Homo Sapiens
agacgcggccgcatcccggtggactgtagaggcggcagcgagctagagcccgagtcgcagctccgggccgcagagcgctgggcgagcgcgagcgccagggcaccggcagggcaggcagctgcgcgcggctggagtcatgctatactgaaaagacacttcatcaagataactctgggagaagcagaaaaccctgtgccagggacaggaaagataggagaaagaaagtttatcagaattttttaaacctgtctcagaaataacaacatattttaatcagagatttatgttgctatgaggacagattcatcaaaaatgactgacgtggagtctggggtcgccaattttgcatcttcagcaagggcaggccgccggaatgccttaccagacatccagagttcagctgccacagacggaacctcagatttgcccctcaaactggaggctctctccgtgaaggaagatgcaaaagagaaagatgaaaaaacaacacaagaccaattggaaaagcctcaaaatgaagaaaaatgaaggctcataatctatcaagagtgctgaatttctgcatgttgaaagacttagtggttctgttttcttgagacatttaatctggtggtaactgtggtaacattgcagccctaagcagcatgtgtatattagataattgtgttgtgatgctactcactttgattgcaatgatgatgtccaaggtaagctattaaaaggcaggttacttccaaatcgcactgaaggaaaaggttaagaataatacatgatcacagaaatgcataccactgtctgtaaacccaacaaaattcactgttctcttttggatttatttagcctgatgtatttttaattcaatttttatggtgatgggcaaatcattcttggtaaatgtaaatcaaacatgattgatttaaaacttcatggaatttgtagaaaattatggacatttttggtgagaaagaacaatagtcaaaactcacatggatagagtgtgtttgttttttgccaaaaatgccccagactttttcccaaacctcaaaaacgtcttggaaaaattgtaaaagtttgataacagaaacatctttaggatatttttgtctgacatattttgcttctagtatgtgcctactgtgatttttttcatgtggaaaatgcaaaatttgtaacaaaatggttatatggaacatgcctattaaatgaattttactatcttccctaactttggtctgtgtatgtgtgtgtgttttactttaatatgaattatacaaaatactagttgttttacactctcttttcttattcttagggcttttgtgtatgtctgacttgtttttaaataacttcctcagcaatgcagaccttaatttttatatttttttaaagtagctaacatagcagtaggcacttaagcatttagtcaatgatattggtagaaatagtaaaatacatcctttaaatatatatctaagcatatattttaaaaggagcaaaaataaaaccaaagtgttagtaaattttgatttattagatattttagaaaaataatagaattctgaagttttaaaaatgtcagtaattaatttattttcattttcagaaatatatgcatgcagttatgttttatttgattgttgacttaggctatgtctgtatacagtaaccaaataaactctttcactattaaagagatttcttactga

SEQ ID NO: 69 - DNA, 1352 bp, Homo Sapiens
atttcagttttcttttccgttttgtgcaatttcacttatgataccggccaatgcttggttgctattttggaaactccccttaggggatgcccctcaactggccctataaagggccagcctgagctgcagaggattcctgcagaggatcaagacagcacgtggacctcgcacagcctctcccacaggtaccatgaaggtctccgcggcagccctcgctgtcatcctcattgctactgccctctgcgctcctgcatctgcctccccatattcctcggacaccacaccctgctgctttgcctacattgcccgcccactgccccgtgcccacatcaaggagtatttctacaccagtggcaagtgctccaacccagcagtcgtctttgtcacccgaaagaaccgccaagtgtgtgccaacccagagaagaaatgggttcgggagtacatcaactctttggagatgagctaggatggagagtccttgaacctgaacttacacaaatttgcctgtttctgcttgctcttgtcctagcttgggaggcttcccctcactatcctaccccacccgctccttgaagggcccagattctaccacacagcagcagttacaaaaaccttccccaggctggacgtggtggctcacgcctgtaatcccagcactttgggaggccaaggtgggtggatcacttgaggtcaggagttcgagaccagcctggccaacatgatgaaaccccatctctactaaaaatacaaaaaattagccgggcgtggtagcgggcgcctgtagtcccagctactcgggaggctgaggcaggagaatggcgtgaacccgggaggcggagcttgcagtgagccgagatcgcgccactgcactccagcctgggcgacagagcgagactccgtctcaaaaaaaaaaaaaaaaaaaaaaatacaaaaattagccgggcgtggtggcccacgcctgtaatcccagctactcgggaggctaaggcaggaaaattgtttgaacccaggaggtggaggctgcagtgagctgagattgtgccacttcactccagcctgggtgacaaagtgagactccgtcacaacaacaacaacaaaaagcttccccaactaaagcctagaagagcttctgaggcgctgctttgtcaaaaggaagtctctaggttctgagctctggctttgccttggctttgccagggctctgtgaccaggaaggaagtcagcatgcctctagaggcaaggaggggaggaacactgcactcttaagcttccgccgtctcaacccctcacaggagcttactggcaaacatgaaaaatcggcttaccattaaagttctcaatgcaaccataaa

SEQ ID NO: 70 - DNA, 5238 bp, Homo Sapiens
aatccgctgctgccggcgtcgggtgcgctcggcctcgcccgcggccctccttccccggctcccgctcgccgctcgttcactccaccgccgccgccgccgccgccgctgccgctgccgctgccgcacctccgtagctgactcggtactctctgaagatggcagaagctcaccaagctgtggcctttcagttcacggtcactccggacgggattgacctgcggctgagccatgaagctcttagacaaatctatctctctggacttcattcctggaaaaagaagttcatcagattcaagaacggcatcatcactggcgtgtacccggcaagcccctccagttggcttatcgtggtggtgggcgtgatgacaacgatgtacgccaagatcgacccctcgttaggaataattgcaaaaatcaatcggactctggaaacggccaactgcatgtccagccagacgaagaacgtggtcagcggcgtgctgtttggcaccggcctgtgggtggccctcatcgtcaccatgcgctactccctgaaagtgctgctctcctaccacgggtggatgttcactgagcacggcaagatgagtcgtgccaccaagatctggatgggtatggtcaagatcttttcaggccgaaaacccatgttgtacagcttccagacatcgctgcctcgcctgccggtcccggctgtcaaagacactgtgaacaggtatctacagtcggtgaggcctcttatgaaggaagaagacttcaaacggatgacagcacttgctcaagattttgctgtcggtcttggaccaagattacagtggtatttgaagttaaaatcctggtgggctacaaattacgtgagcgactggtgggaggagtacatctacctccgaggacgagggccgctcatggtgaacagcaactattatgccatggatctgctgtatatccttccaactcacattcaggcagcaagagccggcaacgccatccatgccatcctgctttacaggcgcaaactggaccgggaggaaatcaaaccaattcgtcttttgggatccacgattccactctgctccgctcagtgggagcggatgtttaatacttcccggatcccaggagaggagacagacaccatccagcacatgagagacagcaagcacatcgtcgtgtaccatcgaggacgctacttcaaggtctggctctaccatgatgggcggctgctgaagccccgggagatggagcagcagatgcagaggatcctggacaatacctcggagcctcagcccggggaggccaggctggcagccctcaccgcaggagacagagttccctgggccaggtgtcgtcaggcctattttggacgtgggaaaaataagcagtctcttgatgctgtggagaaagcagcgttctttgtgacgttagatgaaactgaagaaggatacagaagtgaagacccggatacgtcaatggacagctacgccaaatctctactacacggccgatgttacgacaggtggtttgacaagtcgttcacgtttgttgtcttcaaaaacgggaagatgggcctcaacgctgaacactcctgggcagatgcgccgatcgtggcccacctttgggagtacgtcatgtccattgacagcctccagctgggctatgcggaggatgggcactgcaaaggcgacatcaatccgaacattccgtaccccaccaggctgcagtgggacatcccgggggaatgtcaagaggttatagagacctccctgaacaccgcaaatcttctggcaaacgacgtggatttccattccttcccattcgtagcctttggtaaaggaatcatcaagaaatgtcgcacgagcccagacgcctttgtgcagctggccctccagctggcgcactacaaggacatgggcaagttttgcctcacatacgaggcctccatgacccggctcttccgagaggggaggacggagaccgtgcgctcctgcaccactgagtcatgcgacttcgtgcgggccatggtggacccggcccagacggtggaacagaggctgaagttgttcaagttggcgtctgagaagcatcagcatatgtatcgcctcgccatgaccggctctgggatcgatcgtcacctcttctgcctttacgtggtgtctaaatatctcgctgtggagtcccctttccttaaggaagttttatctgagccttggagattatcaacaagccagacccctcagcagcaagtggagctgtttgacttggagaataacccagagtacgtgtccagcggagggggctttggaccggttgctgatgacggctatggtgtgtcgtacatccttgtgggagagaacctcatcaatttccacatttcttccaagttctcttgccctgagacggattctcatcgctttggaaggcacctgaaagaagcaatgactgacatcatcactttgtttggtctcagttctaattccaaaaagtaattccactggagctgctgggaaggaaaacgagctcttctgatgcaaaccaaatgaaaaataggcattaatcctgaccttagctcgggatgaaacactgctcttaaaaaaactcagttttccttccagaaaatgtgggtgtttttttttcctagaacagtatctctcccctgtgaagcataaccccactacttccagacttgccctcccttgggggacatctgataaagtctcccctgatgtctccgcatcggcttggatttattaagggatgcaaatcttgttgagttaatgaaggaattagtagggttgtggcttcacacacagtggaatggaaatggtgtgctttctcagtggcaaccgaaggcctagtgcttaagggcatttagcatcatccaagcagggtaaacttttgttttgttaaaagaaaaatgtgttattcaagttggtgtccccagttgtagctaacacatctggaatgcactaaccaaaatgctgtgctttggagacctgcttttgtcaccgtgggtaaccgttcccgtctggtccagtagcctgtgtttgcctctccacatttgaagcaagcaggatgcaaggtcttcagttttactgaccttgtatgtcttcaagtcttcacaacccagtgccttaaaaatgaaaggccctaaatgtaagggagatggagagaaagatttattttgtagagtctttgggtggaattgtgggtatactgttcccttcacaattgactgagtatggataaccgtacataagcatttgctacaccccaccagccccctccccctcagaaacaccagttccttcccaagggcagctgtgccagactcccctcccgggactgccttcttgtcatcataagcaacaaaagaaataacaggcacatgtcataaaaggggagcaagggccgtgatggtcagataattcactcaagaataaaacatgacacgtgcctcaggaggatctctttcccaaagtgacagcaaggagggcagggcatcggccaccaagcggggactagcaagtgaggaaggggagggcagcccaccgtggtgaggagagagtggctccacgaccccaagggatggccttctcctcccacccggtgaggggaaagactcaccagagggtgatggagacagtatgccggctcaccttggtgaccagccaagatgtctcaagtgacagtgctaggtgttcacccagcctgtccttcagataggagtgccttcacgaaagcgtctcatggaccacaaagcaattatgcactgagtcatcttcagtatttaatgcaaaaatgaagcatcatggaatgaaattcccactgtctgtcatgacaagcttagctgtccattgttttaaattgtgtatttatttttttgaccacttggttctagttgggcctgactccttcagagtgctgcaccccgatagtacaacagcgatggctgaactgttggagtcgatggaaggtgcttgccggagaacacgtgcctttttttttttttttttttttgagatggagtttcactcttgttgcccaggctggagtgcagtggtgcaatctcggctcactgcagcatctgccttgcaggttcaagcgattctcctgtctcagcctcccaagtagctgggattacacgcccaacaccatgccctgctaatttttgtatttttagtagagacggggtttcatcatattggtcaggctggtctcgaactcctgacctcaggtgatccacctgcctcagcctcccaaagtgctgggattacaggcatgagccaccatgcgcggcccacatgcatgttttatgtatgtatacttcatgatgtaaaaatcccacctttatgggccaaagattttttttctcctgaaagcaagaaaaaatgaaaacaaaagacaaaaaaaaaaaaaaaagcgtccaggcgcggtggctcatgcgtgtaatcccagcactttgggaggccaaggcgggcggatcacgaggtcaggagatggagaccatcctggctaacacggtgaaaccccgtctctactaaaaattcaaaaaatgagccgggcgtggtggcgggcgcctgtagtcccagctactcaggaggctgaggcaggagaatggcgtgaacccgggaggcggagcttgcagtgagccgagatcgctccactgcactccagcctgggcgacagagcgagactccgtctaaaaaaaaaagcaaaaacaaaccaacaacaaaagcccctgactgtccgtcaagcaggcagcggggatgtagctctctctgccctgggcaagaatagcacttcccgttaaaagccagcagccggcgtcagtccctatcagagccagctagatcatgcactgttgaccactgagcaatctgtgttacactagagttcacagggcattttgagtgtagacgtgagtgcttaaacatatttgggtttctctctcaggttttaaatgtttcaaatgtaattgttgctcatcagtgcagttatcaatgcaattttatattccttgaggggagaaagaggggtcttattgtacatgtccaaggggggtgataagagtattatctgtttaatttaattggaacaaaccattgtcttaacgcagccatggtttgaatttgttatcttgggctgaccggtgcatgtaaatacagtatgctctttggatgtaaatcttagaaatgcagtgtgaatgtaggttatcattaataaaacattaaccccagtctactacaa

SEQ ID NO: 71 - DNA, 1626 bp, Homo Sapiens
ggagagatcagccgcccagccaggagttaagctgaggtcgtctgagccctgcgacagcctggacagcaactcaggatggcatcaggcagggcacgctgcacccgaaaactccggaactgggtggtggagcaagtggagagtgggcagtttcccggagtgtgctgggatgatacagctaagaccatgttccggattccctggaaacatgcaggcaagcaggacttccgggaggaccaggatgctgccttcttcaaggcctgggcaatatttaagggaaagtataaggagggggacacaggaggtccagctgtctggaagactcgcctgcgctgtgcactcaacaagagttctgaatttaaggaggttcctgagaggggccgcatggatgttgctgagccctacaaggtgtatcagttgctgccaccaggaatcgtctctggccagccagggactcagaaagtaccatcaaagcgacagcacagttctgtgtcctctgagaggaaggaggaagaggatgccatgcagaactgcacactcagtccctctgtgctccaggactccctcaataatgaggaggagggggccagtgggggagcagtccattcagacattgggagcagcagcagcagcagcagccctgagccacaggaagttacagacacaactgaggccccctttcaaggggatcagaggtccctggagtttctgcttcctccagagccagactactcactgctgctcaccttcatctacaacgggcgcgtggtgggcgaggcccaggtgcaaagcctggattgccgccttgtggctgagccctcaggctctgagagcagcatggagcaggtgctgttccccaagcctggcccactggagcccacgcagcgcctgctgagccagcttgagaggggcatcctagtggccagcaacccccgaggcctcttcgtgcagcgcctttgccccatccccatctcctggaatgcaccccaggctccacctgggccaggcccgcatctgctgcccagcaacgagtgcgtggagctcttcagaaccgcctacttctgcagagacttggtcaggtactttcagggcctgggccccccaccgaagttccaggtaacactgaatttctgggaagagagccatggctccagccatactccacagaatcttatcacagtgaagatggagcaggcctttgcccgatacttgctggagcagactccagagcagcaggcagccattctgtccctggtgtagagcctgggggacccatcttccacctcacctctttgttcttcctgtctcctttgaagtagactcattcttcacacgattgacctgtcctctttgtgataattctcagtagttgtccgtgataatcgtgtcctgaaaatcctcgcacacactggctggtggagaactcaaggctaattttttatccttttttttttttaattttgagatatacgccctctttcatctgtaagggactaggaaattccaaatggtgtgaacccagggggcctttccctcttccctgacctcccaactctaaagccaagcactttatattttcctcttagatattcactaaggacttaaaataaaattttattgaaagaggaa

SEQ ID NO: 72 - DNA, 693 bp, Homo Sapiens
gcagatcgcttgcagcttgctagctgtgtgggctgggaggtctggtagggctgagcttgcaagaggatcaacatgcctgacggtcgctcagcaagaattcctgtcagatcagctgttgagccacaggagcaaaaatcacccaggcgctgacgttgtctggtctacttcagcagtttctactctaagcgagtccacagtcggggtcactttctttgcttagcacctcgacttcgcgcagttttcatcgaagacagttcattacgcattggctagagatttactacatccgtccttggaagaggaaaagaaaaaacataaaaagaaacgcctagtacaaagtccaaattcttactttatggatgtaaaatgtccaggttgctacaagatcaccacggttttcagccatgctcagacagtggttctttgtgtaggttgttcaacagtgttgtgccagcctacaggaggaaaggccagactcacagaagggtgttcatttagaagaaagcaacactaatgattcaaacagcttcctgaattttaattttgtgttgtctcacagaaagccttatcataaattccataattctaattaatttaccaagataatgtaattacatttggttttgtaaggtatacagcagtaatctcctattttggtgtcagtttttcaataaagttttgattatgggcaaa

SEQ ID NO: 73 - DNA, 719 bp, Homo Sapiens
ggcaggagctacccttcccgtggccccggaccttgggtgggctgtgggctcagggagcggaggggaggccttaagcatccactctctgcccggtgtttttgttctcatcagggagcctcagatgggaagggactcgagccccacctgtccctggactctggaatgccacggaattaacccgagcaggcatggaggcctctgctctcacctcatcagcagtgaccagtgtggccaaagtggtcagggtggcctctggctctgccgtagttttgcccctggccaggattgctacagttgtgattggaggagtggcggctgtgcccatggtgctcagtgccatgggcttcactgcggcgggaatcgcctcgtcctccatagcagccaagatgatgtccgcggcggccattgccaatgggggtggagttgcctcgggcagccttgtggctactctgcagtcactgggagcaactggactctccggattgaccaagttcatcctgggctccattgggtctgccattgcggctgtcattgcgaggttctactagctccctgcccctcgccctgcagagaagagaaccatgccaggggagaaggcacccagccatcctgacccagcgaggagccaactatcccaaatatacctggggtgaaatataccaaattctgcatctccagaggaaaataagaaataaagatgaattgttgcaactcttccc

SEQ ID NO: 74 - DNA, 2582 bp, Homo Sapiens
agtagtgcagcccgtggagccgcggctttgcccgtctcctctgggtggccccagtgcgcgggctgacactcattcagccggggaaggtgaggcgagtagaggctggtgcggaacttgccgcccccagcagcgccggcgggctaagcccagggccgggcagacaaaagaggccgcccgcgtaggaaggcacggccggcggcggcggagcgcagcgatggccgggcgagggggcagcgcgctgctggctctgtgcggggcactggctgcctgcgggtggctcctgggcgccgaagcccaggagcccggggcgcccgcggcgggcatgaggcggcgccggcggctgcagcaagaggacggcatctccttcgagtaccaccgctaccccgagctgcgcgaggcgctcgtgtccgtgtggctgcagtgcaccgccatcagcaggatttacacggtggggcgcagcttcgagggccgggagctcctggtcatcgagctgtccgacaaccctggcgtccatgagcctggtgagcctgaatttaaatacattgggaatatgcatgggaatgaggctgttggacgagaactgctcattttcttggcccagtacctatgcaacgaataccagaaggggaacgagacaattgtcaacctgatccacagtacccgcattcacatcatgccttccctgaacccagatggctttgagaaggcagcgtctcagcctggtgaactcaaggactggtttgtgggtcgaagcaatgcccagggaatagatctgaaccggaactttccagacctggataggatagtgtacgtgaatgagaaagaaggtggtccaaataatcatctgttgaaaaatatgaagaaaattgtggatcaaaacacaaagcttgctcctgagaccaaggctgtcattcattggattatggatattccttttgtgctttctgccaatctccatggaggagaccttgtggccaattatccatatgatgagacgcggagtggtagtgctcacgaatacagctcctccccagatgacgccattttccaaagcttggcccgggcatactcttctttcaacccggccatgtctgaccccaatcggccaccatgtcgcaagaatgatgatgacagcagctttgtagatggaaccaccaacggtggtgcttggtacagcgtacctggagggatgcaagacttcaattaccttagcagcaactgttttgagatcaccgtggagcttagctgtgagaagttcccacctgaagagactctgaagacctactgggaggataacaaaaactccctcattagctaccttgagcagatacaccgaggagttaaaggatttgtccgagaccttcaaggtaacccaattgcgaatgccaccatctccgtggaaggaatagaccacgatgttacatccgcaaaggatggtgattactggagattgcttatacctggaaactataaacttacagcctcagctccaggctatctggcaataacaaagaaagtggcagttccttacagccctgctgctggggttgattttgaactggagtcattttctgaaaggaaagaagaggagaaggaagaattgatggaatggtggaaaatgatgtcagaaactttaaatttttaaaaaggcttctagttagctgctttaaatctatctatataatgtagtatgatgtaatgtggtcttttttttagattttgtgcagttaatacttaacattgatttattttttaatcatttaaatattaatcaactttccttaaaataaatagcctcttaggtaaaaatataagaacttgatatatttcattctcttatatagtattcattttcctacctatattacacaaaaaagtatagaaaagatttaagtaattttgccatcctaggcttaaatgcaatattcctggtattatttacaatgcagaattttttgagtaattctagctttcaaaaattagtgaagttcttttactgtaattggtgacaatgtcacataatgaatgctattgaaaaggttaacagatacagctcggagttgtgagcactctactgcaagacttaaatagttcagtataaattgtcgtttttttcttgtgctgactaactataagcatgatcttgttaatgcatttttgatgggaagaaaaggtacatgtttacaaagaggttttatgaaaagaataaaaattgacttcttgcttgtacatataggagcaatactattatattatgtagtccgttaacactacttaaaagtttagggttttctcttggttgtagagtggcccagaattgcattctgaatgaataaaggttaaaaaaaaatccccagtgcatgtatttcagttctctaagatttttggtctggcattgtggtcttatgatgaaaacatgtatcctcttaatggcggcttctcatatattcatcctgtacattttaaaatttgttaagcaactactgtgtgctaagcactgcatagcctctatgtatgttattgtggcaggcaaaaggttctgattttgggcacaacctttatataaataacacaaaaattaa

SEQ ID NO: 75 - DNA, 1280 bp, Homo Sapiens
gcaggagcccagtacagaggatgaagccactgatggggctggctgcacatccgtaactgggagccctggctccaagcccattccatcccaactcagactctgagtctcaccctaagaagtactctcatagtttcttccctaagtttcttaccgcatgctttcagactgggctcttctttgttctcttgctgaggatcttattttaaatgcaagtcacacctagtctgcaactgcaggtcagaaatggtttcacagtggggtgccaggaagcagggaagctgcaggagccagttctactggggtgggtgaatggaggtgatggcagacacttttactgaatgtcggtctttttttgtgattattctagttatctccagaagaagaagagaaaaggagaatccgaagggaaaggaataagatggctgcagccaaatgccgcaaccggaggagggagctgactgatacactccaagcggagacagaccaactagaagatgagaagtctgctttgcagaccgagattgccaacctgctgaaggagaaggaaaaactagagttcatcctggcagctcaccgacctgcctgcaagatccctgatgacctgggcttcccagaagagatgtctgtggcttcccttgatctgactgggggcctgccagaggttgccaccccggagtctgaggaggccttcaccctgcctctcctcaatgaccctgagcccaagccctcagtggaacctgtcaagagcatcagcagcatggagctgaagaccgagccctttgatgacttcctgttcccagcatcatccaggcccagtggctctgagacagcccgctccgtgccagacatggacctatctgggtccttctatgcagcagactgggagcctctgcacagtggctccctggggatggggcccatggccacagagctggagcccctgtgcactccggtggtcacctgtactcccagctgcactgcttacacgtcttccttcgtcttcacctaccccgaggctgactccttccccagctgtgcagctgcccaccgcaagggcagcagcagcaatgagccttcctctgactcgctcagctcacccacgctgctggccctgtgagggggcagggaaggggaggcagccggcacccacaagtgccactgcccgagctggtgcattacagagaggagaaacacatcttccctagagggttcctgtagacctagggaggaccttatctgtgcgtgaaacacaccaggctgtgggcctcaaggacttgaaa

SEQ ID NO: 76 - DNA, 505 bp, Homo Sapiens
ggaacacatccaagcttaagacggtgaggtcagcttcacattctcaggaactctccttctttggccaggattgctacagttgtgattggaggagttgtggccatggcggctgtgcccatggtgctcagtgccatgggcttcactgcggcgggaatcgcctcgtcctccatagcagccaagatgatgtccgcggcggccattgccaatgggggtggagttgcctcgggcagccttgtggctactctgcagtcactgggagcaactggactctccggattgaccaagttcatcctgggctccattgggtctgccattgcggctgtcattgcgaggttctactagctccctgcccctcgccctgcagagaagagaaccatgccaggggagaaggcacccagccatcctgacccagcgaggagccaactatcccaaatatacctggggtgaaatataccaaattctgcatctccagaggaaaataagaaataaagatgaattgttgcaa

SEQ ID NO: 77 - DNA, 735 bp, Homo Sapiens
ggaggcagcgagaaagcgcagccaggcggctgctcggcgttctctcaggtgactgctcggagttctcccagtttctcttttaacagtgtttggtgttgcaagcaggatccaaaggagacctatagtgactcccaggagctcttagtgaccaagtgaagctctctgactttatttgagcaattctttgatggattggctccagaattggattggattcagtgaagaaactgaaactggactggtgctctaggaggcctcaagtagataaggttactagaagacagggaatcctgggcttatctggatttaaggagtctacaactccatctgcaactccagccgatttcatttataagaattatggaccaagaacctgtgcttttctagagaaatgtgtgagccttactaaaggtaacttagaattacaatggactgctgagaccagctcggtcgtggagaccctaacccagcagcgctagaggaatcaaagacacacacacagaaatgtagagtgtggagtgggaaatcaggggactcacagccttcagagctgagagcccctaacagagatttacccacatatttactgacagcaagccagtgataagcattatcgctatagattatagattaactaaaagtattccttacaggaaacaaagggatgggccgaaacaaagggataggctctggctagatgtctgcagcaggaacacgtccttaaggcacagattg

SEQ ID NO: 78 - DNA, 605 bp, Homo Sapiens
gctccgtctcccactttcctccccctagatcggctggagctggaagcggcgcagaagttcctggagcgtgcggccgtggagaacctgcccactttccttgtggaactgtccagagtgctggcaaatccaggaaacagtcaggttgccagagttgcagctggtctacaaatcaagaactctttgacatctaaagatccagatatcaaggcacaatatcagcagaggtggcttgctattgatgctaatgctcgacgagaagtcaagaactatgttttgcagacattgggtacagaaacttaccggcctagttctgcctcacagtgtgtggctggtattgcttgtgcagagatcccagtaaaccagtggccagaactcattcctcagctggtggccaatgtcacaaaccccaacagcacagagcacatgaaggagtcgacattggaagccatcggttatatttgccaagatatagacccagagcagctacaagataaatccaatgagattctgactgccataatccaggggatgaggaaagaagagcctagtaataatgtgaagctagctgctacgaatgcactcctgaactcattggagttcaccaa

SEQ ID NO: 79 - DNA, 550 bp, Homo Sapiens
agccttataagctgagggagtggagaggcccggggccaggaaagcagagacagacaaagcgttaggagaagaagagaggcagggaagacaagccaggcacgatggccaccttcccaccagcaaccagcgccccccagcagcccccaggcccggaggacgaggactccagcctggatgaatctgacctctatagcctggcccattcctacctcgggcctctcatcatgcctatgcccacttcacctctgactcctgccttggttacaggaggtggaggccggaaaggtcgcaccaagagagaagctgctgccaacaccaaccgccccagccctggcgggcacgagaggaaactggtgaccaagctgcagaattcagagaggaagaagcgaggggcacggcgctgagacagagctggagatgaggccagaccatggacactacacccagcaatagagacgggactgcggaggaaggaggacccaggacaggatccaggccggcttgccacaccccccacccctaggacttattcccgctgactgagtctctg

SEQ ID NO: 80 - DNA, 6288 bp, Homo Sapiens
agtaaggggctggttgcctgcatgagtgtgtgctctgtgtcactgtggattggagttgaaaaagcttgactggcgtcattcaggagctggatggcgtgggacatgtgcaaccaggactctgagtctgtatggagtgacatcgagtgtgctgctctggttggtgaagaccagcctctttgcccagatcttcctgaacttgatctttctgaactagatgtgaacgacttggatacagacagctttctgggtggactcaagtggtgcagtgaccaatcagaaataatatccaatcagtacaacaatgagccttcaaacatatttgagaagatagatgaagagaatgaggcaaacttgctagcagtcctcacagagacactagacagtctccctgtggatgaagacggattgccctcatttgatgcgctgacagatggagacgtgaccactgacaatgaggctagtccttcctccatgcctgacggcacccctccaccccaggaggcagaagagccgtctctacttaagaagctcttactggcaccagccaacactcagctaagttataatgaatgcagtggtctcagtacccagaaccatgcaaatcacaatcacaggatcagaacaaaccctgcaattgttaagactgagaattcatggagcaataaagcgaagagtatttgtcaacagcaaaagccacaaagacgtccctgctcggagcttctcaaatatctgaccacaaacgatgaccctcctcacaccaaacccacagagaacagaaacagcagcagagacaaatgcacctccaaaaagaagtcccacacacagtcgcagtcacaacacttacaagccaaaccaacaactttatctcttcctctgaccccagagtcaccaaatgaccccaagggttccccatttgagaacaagactattgaacgcaccttaagtgtggaactctctggaactgcaggcctaactccacccaccactcctcctcataaagccaaccaagataacccttttagggcttctccaaagctgaagtcctcttgcaagactgtggtgccaccaccatcaaagaagcccaggtacagtgagtcttctggtacacaaggcaataactccaccaagaaagggccggagcaatccgagttgtatgcacaactcagcaagtcctcagtcctcactggtggacacgaggaaaggaagaccaagcggcccagtctgcggctgtttggtgaccatgactattgccagtcaattaattccaaaacagaaatactcattaatatatcacaggagctccaagactctagacaactagaaaataaagatgtctcctctgattggcaggggcagatttgttcttccacagattcagaccagtgctacctgagagagactttggaggcaagcaagcaggtctctccttgcagcacaagaaaacagctccaagaccaggaaatccgagccgagctgaacaagcacttcggtcatcccagtcaagctgtttttgacgacgaagcagacaagaccggtgaactgagggacagtgatttcagtaatgaacaattctccaaactacctatgtttataaattcaggactagccatggatggcctgtttgatgacagcgaagatgaaagtgataaactgagctacccttgggatggcacgcaatcctattcattgttcaatgtgtctccttcttgttcttcttttaactctccatgtagagattctgtgtcaccacccaaatccttattttctcaaagaccccaaaggatgcgctctcgttcaaggtccttttctcgacacaggtcgtgttcccgatcaccatattccaggtcaagatcaaggtctccaggcagtagatcctcttcaagatcctgctattactatgagtcaagccactacagacaccgcacgcaccgaaattctcccttgtatgtgagatcacgttcaagatcgccctacagccgtcggcccaggtatgacagctacgaggaatatcagcacgagaggctgaagagggaagaatatcgcagagagtatgagaagcgagagtctgagagggccaagcaaagggagaggcagaggcagaaggcaattgaagagcgccgtgtgatttatgtcggtaaaatcagacctgacacaacacggacagaactgagggaccgttttgaagtttttggtgaaattgaggagtgcacagtaaatctgcgggatgatggagacagctatggtttcattacctaccgttatacctgtgatgcttttgctgctcttgaaaatggatacactttgcgcaggtcaaacgaaactgactttgagctgtacttttgtggacgcaagcaatttttcaagtctaactatgcagacctagattcaaactcagatgactttgaccctgcttccaccaagagcaagtatgactctctggattttgatagtttactgaaagaagctcagagaagcttgcgcaggtaacatgttccctagctgaggatgacagagggatggcgaatacctcatgggacagcgcgtccttccctaaagactattgcaagtcatacttaggaatttctcctactttacactctctgtacaaaaacaaaacaaaacaacaacaatacaacaagaacaacaacaacaataacaacaatggtttacatgaacacagctgctgaagaggcaagagacagaatgatatccagtaagcacatgtttattcatgggtgtcagctttgcttttcctggagtctcttggtgatggagtgtgcgtgtgtgcatgtatgtgtgtgtgtatgtatgtgtgtggtgtgtgtgcttggtttaggggaagtatgtgtgggtacatgtgaggactgggggcacctgaccagaatgcgcaagggcaaaccatttcaaatggcagcagttccatgaagacacgcttaaaacctagaacttcaaaatgttcgtattctattcaaaaggaaatatatatatatatatatatatatatatatatatatataaattaaaaaggaaagaaaactaacaaccaaccaaccaaccaaccaaccacaaaccaccctaaaatgacagccgctgatgtctgggcatcagcctttgtactctgtttttttaagaaagtgcagaatcaacttgaagcaagctttctctcataacgtaatgattatatgacaatcctgaagaaaccacaggttccatagaactaatatcctgtctctctctctctctctctctctctcttttttttttctttttccttttgccatggaatctgggtgggagaggatactgcgggcaccagaatgctaaagtttcctaacattttgaagtttctgtagttcatccttaatcctgacacccatgtaaatgtccaaaatgttgatcttccactgcaaatttcaaaagccttgtcaatggtcaagcgtgcagcttgttcagcggttctttctgaggagcggacaccgggttacattactaatgagagttgggtagaactctctgagatgtgttcagatagtgtaattgctacattctctgatgtagttaagtatttacagatgttaaatggagtatttttattttatgtatatactatacaacaatgttcttttttgttacagctatgcactgtaaatgcagccttcttttcaaaactgctaaatttttcttaatcaagaatattcaaatgtaattatgaggtgaaacaattattgtacactaacatatttagaagctgaacttactgcttatatatatttgattgtaaaaacaaaaagacagtgtgtgtgtctgttgagtgcaacaagagcaaaatgatgctttccgcacatccatcccttaggtgagcttcaatctaagcatcttgtcaagaaatatcctagtcccctaaaggtattaaccacttctgcgatatttttccacattttcttgtcgcttgtttttctttgaagttttatacactggatttgttaggggaatgaaattttctcatctaaaatttttctagaagatatcatgattttatgtaaagtctctcaatgggtaaccattaagaaatgtttttattttctctatcaacagtagttttgaaactagaagtcaaaaatctttttaaaatgctgttttgttttaatttttgtgattttaatttgatacaaaatgctgaggtaataattatagtatgatttttacaataattaatgtgtgtctgaagactatctttgaagccagtatttctttcccttggcagagtatgacgatggtatttatctgtattttttacagttatgcatcctgtataaatactgatatttcattcctttgtttactaaagagacatatttatcagttgcagatagcctatttattataaattatgagatgatgaaaataataaagccagtggaaattttctacctaggatgcatgacaattgtcaggttggagtgtaagtgcttcatttgggaaattcagcttttgcagaagcagtgtttctacttgcactagcatggcctctgacgtgaccatggtgttgttcttgatgacattgcttctgctaaatttaataaaaacttcagaaaaacctccattttgatcatcaggatttcatctgagtgtggagtccctggaatggaattcagtaacatttggagtgtgtattcaagtttctaaattgagattcgattactgtttggctgacatgacttttctggaagacatgatacacctactactcaattgttcttttcctttctctcgcccaacacgatcttgtaagatggatttcacccccaggccaatgcagctaattttgatagctgcattcatttatcaccagcatattgtgttctgagtgaatccactgtttgtcctgtcggatgcttgcttgattttttggcttcttatttctaagtagatagaaagcaataaaaatactatgaaatgaaagaacttgttcacaggttctgcgttacaacagtaacacatctttaatccgcctaattcttgttgttctgtaggttaaatgcaggtattttaactgtgtgaacgccaaactaaagtttacagtctttctttctgaattttgagtatcttctgttgtagaataataataaaaagactattaagagcaataaattatttttaagaaatcgagatttagtaaatcctattatgtgttcaaggaccacatgtgttctctattttgcctttaaatttttgtgaaccaattttaaatacattctcctttttgccctggattgttgacatgagtggaatacttggtttcttttcttacttatcaaaagacagcactacagatatcatattgaggattaatttatcccccctacccccagcctgacaaatattgttaccatgaagatagttttcctcaatggacttcaaattgcatctagaattagtggagcttttgtatcttctgcagacactgtgggtagcccatcaaaatgtaagctgtgctcctctcatttttatttttatttttttgggagagaatatttcaaatgaacacgtgcaccccatcatcactggaggcaaatttcagcatagatctgtaggatttttagaagaccgtgggccattgccttcatgccgtggtaagtaccacatctacaattttggtaaccgaactggtgctttagtaatgtggatttttttcttttttaaaagagatgtagcagaataattcttccagtgcaacaaaatcaattttttgctaaacgactccgagaacaacagttgggctgtcaacattcaaagcagcagagagggaactttgcactattggggtatgatgtttgggtcagttgataaaaggaaaccttttcatgcctttagatgtgagcttccagtaggtaatgattatgtgtcctttcttgatggctgtaatgagaacttcaatcactgtagtctaagacctgatctatagatgacctagaatagccatgtactataatgtgatgattctaaatttgtacctatgtgacagacattttcaataatgtgaactgctgatttgatggagctactttaagatttgtaggtgaaagtgtaatactgttggttgaactatgctgaagagggaaagtgagcgattagttgagcccttgccgggccttttttccacctgccaattctacatgtattgttgtggttttattcattgtatgaaaattcctgtgattttttttaaatgtgcagtacacatcagcctcactgagctaataaagggaaacgaatgtttcaaatcta

SEQ ID NO: 81 - DNA, 2977 bp, Homo Sapiens
atgctggtttgctacagtgttttagcttgtgagattctctgggaccttccctgctccatcatggggtcacctctaggtcattttacctgggacaaatacctaaaagaaacatgttcagtcccagcgcctgtccattgcttcaagcagtcctacacacctccaagcaacgagttcaagatcagtatgaaattggaagcacaggaccccaggaacaccacatccacctgtattgccacagtagttggactgacaggtgcccgccttcgcctgcgccttgatgggagcgacaacaaaaatgacttctggcggctggttgactcagctgaaatccagcctattgggaactgtgaaaagaatgggggtatgctacagccacctcttggatttcggctgaatgcgtcttcttggcccatgttccttttgaagacgctaaatggagcagagatggctcccatcaggattttccacaaggagccaccatcgccttcccacaacttcttcaaaatgggaatgaagctagaagctgtggacaggaagaaccctcatttcatttgcccagccactattggggaggttcggggctcagaggtgcttgtcacttttgatgggtggcgaggggcctttgactactggtgccgcttcgactcccgagacatcttccctgtgggctggtgttccttgactggagacaacctgcagcctcctggcaccaaagttgtgattccaaagaatccctatcctgcctccgatgtgaatactgagaagcccagcatccacagcagcaccaaaactgtcttggaacatcaaccagggcagagggggcgtaaaccaggaaagaagcggggccggacacccaagaccctaatttcccatcccatctctgccccatccaagacagctgaacctttgaaattcccaaagaagagaggtcccaaacctggcagcaagaggaaacctcggactttgctgaacccaccacctgcctcaccaacaaccagcactcctgaaccggataccagcactgtaccccaggatgctgccaccatccccagctcagccatgcaggccccaacagtttgtatctacttgaacaagaatggcagcacaggcccccacttagataagaagaaggtccagcaactccctgaccattttggaccagcccgtgcctctgtggtgttgcagcaggctgtccaggcctgtatcgactgtgcttatcaccagaaaaccgtcttcagcttcctcaagcaaggccatggtggtgaggttatctcagccgtgtttgaccgggaacagcataccctcaacctcccagcagtcaacagcatcacctacgtcctccgcttcctggagaaactctgccacaaccttcgtagtgacaatctgtttggcaaccagccctttacacagactcacttgtcactcactgccatagagtacagccacagccacgacaggtacctaccaggtgaaacctttgtcctggggaatagtctggcccgctccttggaaccacactcagactcaatggactctgcctcaaatcccaccaaccttgtcagcacctcccaaaggcaccggcccttgctttcatcctgtggcctcccaccaagcactgcctcagctgtgcgcaggctatgctccaggggagtgttaaaaggatcaaatgaaagaagggatatggaatcattttggaaactaaatcgttccccagggtcggaccgatacctggagagccgcgatgcctctcgactgagtggccgggacccctcctcatggacagtcgaggatgtgatgcagtttgtccgggaagctgatcctcagcttggaccccacgctgacctgtttcgcaaacacgagatcgatggcaaggccctgctgctgctgcgcagtgacatgatgatgaagtacatgggcctgaagctggggcctgcactcaagctctcctaccacattgaccggctgaagcagggcaagttctgaaccaggagaggcagcctagacaaccaagtggcagcaggtgggggcattcttctaggaatgaggggcatcagcccaccccaggcacctcagtggggttccgggccacctcaggactccaagaggctgtgtggagccaccactcctagccacagctgccatgataagtccttccatgaaggactgaggagggagagtgggggtccagggctggtgctgctcttccctcagctctgccggggctctaaggtccctctatttatttctcaaccctggctggcctctcaccaggagtttaggctgaatgccttccacgtgatggaggaaaaggccaactctgtcctggtcttgctgtggcaccccatcgccccacagctcgtaccttctcaccagattcccctgaatccaaactcgtggtgcaaacctctaccttttttacaaaaagatcttattgttaatttattgtttctggcacttgggcaaaccctgtagttaatactcctcccacactagacactgggtttcaggaggagggagactgccctgctttggtcccagagaggccctctgcagataggcgtggcccctcttcagaggacactaccctagggcactttctctttgaggtggagagacccataaagccttgaccacatcactccatatggggaggagaaggatccctgtcaccttctcctctcttcacggggcccttttgcagccctaggcctcatctgtgggaagggagtccctggcttatactgcccccaccacagctccttgccctggccagaactgctgtcgaagaaaatcaggccggaaggccaagaaggcgctaagggggatgggagggcaggttttccaggctggagtcggttccacccactcgcctgtccacaggcttccttgtaagcaagtcagcagcacagctactcacgctgccatctggacttattttatgtcaatctgtttataaataaaaaccaatatagatacc

SEQ ID NO: 82 - DNA, 669 bp, Homo Sapiens
acttcctcctgggccgccgccgccgccgccgacttaaactttggagggggaaaaagagctactggcgcctggcgaccctccctgccccccacccaaccccgctccggcaacgcccccttcctcacggctcccgaccgaacttttctccaacttctgcgactcgtgagattcccttctacccactccggccctcgggacccctctgcccatcccctggccggtcgggtccctgcgaacccctttatctctggaatccactcggtccccgactcagagactcctgccctccacccccaaggaccccgccatcctcaggtcccctccgcctgccagatcttttctcggatccccgctctcccaccacctgctcacgagatcccgcggatctagaacccagggtcccccggggccccccggccgggtcccgggtgggctccaggcggccggtccccggcctccccccatggccaccgccccctcttatcccgccgggctccctggctctcccgggccggggtctcctccgccccccggcggcctagagctgcagtcgccgccaccgctactgccccagatcccggccccgggttccggggtctcctttcacatccagatcgggctgacccgcgagttcgtgctgttgcccgccgcctccgagctggctcatgt

SEQ ID NO: 83 - DNA, 3776 bp, Homo Sapiens
accagcgttcgggagcctgtcgcagcgggaccgacggaatccggagcaggcgacagggcgcagaagcgggatgtacttctgttggggcgccgactccagggagctgcagcgccggaggacggcgggcagccccggggctgagctactgcaggcggccagcggggagcgccactctctgctgctgctgaccaaccacagggtcctctcgtgcggagacaacagcaggggtcagctgggccgcaggggcgcgcagcgcggggagctgccagaaccaattcaggcattggaaaccctaattgttgatctcgtgagctgcgggaaggagcactccctggctgtgtgccacaaaggaagggtcttcgcatggggagctggttctgaagggcagctggggattggagaattcaaggaaataagtttcacacctaagaaaataatgactctgaatgatataaaaataatacaagtttcctgtggacactaccactccctggcattatcaaaagatagccaagtgttttcgtggggaaagaacagccatgggcagctgggcttggggaaggagttcccctcccaagccagcccgcagagggtgaggtccctggaggggatcccactggctcaggtggctgccggaggggctcacagctttgccctgtctctctgtgggacttcgtttggctggggaagtaacagtgccgggcagctggccctcagtgggcgtaatgtcccagtgcaaagcaacaagcctctctcagtcggtgcactgaagaatctaggtgtggtttatatcagctgtggtgatgcacacactgcggtgcttacccaggacgggaaagtgttcacatttggagacaatcgctctggacagctgggatacagccccactcctgagaagagaggtccacaacttgtggaaagaattgatggcctagtttcgcagatagattgtggaagttatcacaccctggcatatgtgcacaccactggtcaggtggtatcttttggtcatggaccaagtgacacaagcaagccaactcatccggaggccctgacagagaactttgacattagctgcctgatttctgctgaagacttcgtggatgttcaagtcaaacacatttttgctggaacatatgccaactttgtgacaactcatcaggatactagttccacacgtgctcccgggaaaaccctgccagaaataagccgaattagccagtccatggcagaaaaatggatagcagtgaaaagaagaagtactgaacatgaaatggctaaaagtgaaattagaatgatattttcatctcctgcttgtctgactgcaagttttttaaagaaaagaggaactggagaaacgacttccattgatgtggacttagaaatggcaagagataccttcaagaagttaacaaaaaaggaatggatttcttccatgataactacgtgtctcgaggatgatctgctcagagctcttccatgccattctccacaccaagaagctttatcagttttcctcctgctcccagaatgtcctgtgatgcatgattctaagaactggaagaacctggtggttccatttgcaaaggctgtgtgtgaaatgagtaaacaatctttgcaagtcctaaagaagtgttgggcatttttgcaagaatcttctctgaatccgctgatccagatgcttaaagcagccatcatctctcagctgcttcatcagactaaaaccgaacaggatcactgtaatgttaaagctcttttaggaatgatgaaagaactgcataaggtaaacaaagctaactgtcgactaccagaaaatactttcaacataaatgaactctccaacttattaaacttttatatagatagaggaagacagctctttcgggataaccacctgatacctgcagaaacccccagtcctgttattttcagtgattttccatttatctttaattcgctatccaaaattaaattattgcaagctgattcacatataaagatgcagatgtcagaaaagaaagcatacatgcttatgcatgaaacaattctgcaaaaaaaggatgaatttcctccatcacccagatttatacttagagtcagacgaagtcgcctggttaaagatgctctgcgtcaattaagtcaagctgaagctactgacttctgcaaagtattagtggttgaatttattaatgaaatttgtcctgagtctggaggggttagttcagagttcttccactgtatgtttgaagagatgaccaagccagaatatggaatgttcatgtatcctgaaatgggttcctgcatgtggtttcctgccaagcctaaacctgagaagaaaagatatttcctctttggaatgctgtgtggactctccttattcaatttaaatgttgctaaccttcctttcccactggctctgtataaaaaacttctggaccaaaagccatcattggaagatttaaaagaactcagtcctcggttggggaagagtttgcaagaagttctagatgatgctgctgatgacattggagatgcgctctgcatacgcttttctatacactgggaccaaaatgatgttgacttaattccaaatgggatctccatacctgtggaccaaaccaacaagagagactatgtttctaagtatattgattacattttcaacgtctctgtaaaagcagtttatgaggaatttcagagaggattttatagagtctgtgagaaggagatacttagacatttctaccctgaagaactaatgacagcaatcattggaaatactgattatgactggaaacagtttgaacagaattcaaagtatgagcaaggataccaaaaatcacatcctactatacagttgttttggaaggctttccacaaactaaccttggatgaaaagaaaaaattcctctttttccttacaggacgtgataggctgcatgcaagaggcatacagaaaatggaaatagtatttcgctgtcctgaaactttcagtgaaagagatcacccaacatcaataacttgtcataatattctctccctccctaagtattctacaatggaaagaatggaggaagcacttcaagtagccatcaacaacaacagaggatttgtctcacccatgctcacacagtcataatcacctctgagagactcagggtgggctttctcacacttggatccttctgttcttccttacacctaaataatacaagagattaatgaatagtggttagaagtagttgagggagagattgggggaatggggagatgatgatgatggtcaaagggtgcaaaatctcacacaagactgaggcaggagaatagggtacagagatagggatctaaggatgacttggacacactccctggcactgaagagtctgaacactggcctgtgattggtccattccaggaccttcatttgcataaggtatcaaaccacatcagcctctgattggccatgggccagacctgcactctggccaatgattggttcattccaggacattcatttgcataaggagtcaaaccacaccagtcttggattggctgtgagccaattcacctcagtctctaattggctgtgagtcagtctttcatttacatagggtgtaaccatcaagaaacctctacagggtacttaagccccagaagattttgctaccagggctcttgagccacttgctctagcccactcccaccctgtggaatgtactttcacttttgctgcttcactgccttgtgctccaataaatccactccttcaccaccca

SEQ ID NO: 84 - DNA, 796 bp, Homo Sapiens
ccaaccgcatctgcagcgagcatctgagaagccaagactgagccggcggccgcggcgcagcgaacgagcagtgaccgtgctcctacccagctctgctccacagcgcccacctgtctccgcccctcggcccctcgcccggctttgcctaaccgccacgatgatgttctcgggcttcaacgcagactacgaggcgtcatcctcccgctgcagcagcgcgtccccggccggggatagcctctcttactaccactcacccgcagactccttctccagcatgggctcgcctgtcaacgcgcaggacttctgcacggacctggccgtctccagtgccaacttcattcccacggtcactgccatctcgaccagtccggacctgcagtggctggtgcagcccgccctcgtctcctccgtggccccatcgcagaccagagcccctcaccctttcggagtccccgccccctccgctggggcttactccagggctggcgttgtgaagaccatgacaggaggccgagcgcagagcattggcaggaggggcaaggtggaacaggtgaggaactctagcgtactcttcctgggaatgtgggggctgggtgggaagcagccccggagatgcaggagcccagtacagaggatgaagccactgatggggctggctgcacatccgtaactgggagccctggctccaagcccattccatcccaactcagactctgagtctcaccctaagaagtactctcatagtttcttccctaagtttcttaccgcatgctttcagactgggctcttctttgtt

SEQ ID NO: 85 - DNA, 2382 bp, Homo Sapiens
ctccttctccttccaggtactctctgaagatggcagaagctcaccaagctgtggcctttcagttcacggtcactccggacgggattgacctgcggctgagccatgaagctcttagacaaatctatctctctggacttcattcctggaaaaagaagttcatcagattcaagaacggcatcatcactggcgtgtacccggcaagcccctccagttggcttatcgtggtggtgggcgtgatgacaacgatgtacgccaagatcgacccctcgttaggaataattgcaaaaatcaatcggactctggaaacggccaactgcatgtccagccagacgaagaacgtggtcagcggcgtgctgtttggcaccggcctgtgggtggccctcatcgtcaccatgcgctactccctgaaagtgctgctctcctaccacgggtggatgttcactgagcacggcaagatgagtcgtgccaccaagatctggatgggtatggtcaagatcttttcaggccgaaaacccatgttgtacagcttccagacatcgctgcctcgcctgccggtcccggctgtcaaagacactgtgaacaggtatctacagtcggtgaggcctcttatgaaggaagaagacttcaaacggatgacagcacttgctcaagattttgctgtcggtcttggaccaagattacagtggtatttgaagttaaaatcctggtgggctacaaattacgtgagcgactggtgggaggagtacatctacctccgaggacgagggccgctcatggtgaacagcaactattatgccatggatctgctgtatatccttccaactcacattcaggcagcaagagccggcaacgccatccatgccatcctgctttacaggcgcaaactggaccgggaggaaatcaaaccaattcgtcttttgggatccacgattccactctgctccgctcagtgggagcggatgtttaatacttcccggatcccaggagaggagacagacaccatccagcacatgagagacagcaagcacatcgtcgtgtaccatcgaggacgctacttcaaggtctggctctaccatgatgggcggctgctgaagccccgggagatggagcagcagatgcagaggatcctggacaatacctcggagcctcagcccggggaggccaggctggcagccctcaccgcaggagacagagttccctgggccaggtgtcgtcaggcctattttggacgtgggaaaaataagcagtctcttgatgctgtggagaaagcagcgttctttgtgacgttagatgaaactgaagaaggatacagaagtgaagacccggatacgtcaatggacagctacgccaaatctctactacacggccgatgttacgacaggtggtttgacaagtcgttcacgtttgttgtcttcaaaaacgggaagatgggcctcaacgctgaacactcctgggcagatgcgccgatcgtggcccacctttgggagtacgtcatgtccattgacagcctccagctgggctatgcggaggatgggcactgcaaaggcgacatcaatccgaacattccgtaccccaccaggctgcagtgggacatcccgggggaatgtcaagaggttatagagacctccctgaacaccgcaaatcttctggcaaacgacgtggatttccattccttcccattcgtagcctttggtaaaggaatcatcaagaaatgtcgcacgagcccagacgcctttgtgcagctggccctccagctggcgcactacaaggacatgggcaagttttgcctcacatacgaggcctccatgacccggctcttccgagaggggaggacggagaccgtgcgctcctgcaccactgagtcatgcgacttcgtgcgggccatggtggacccggcccagacggtggaacagaggctgaagttgttcaagttggcgtctgagaagcatcagcatatgtatcgcctcgccatgaccggctctgggatcgatcgtcacctcttctgcctttacgtggtgtctaaatatctcgctgtggagtcccctttccttaaggaagttttatctgagccttggagattatcaacaagccagacccctcagcagcaagtggagctgtttgacttggagaataacccagagtacgtgtccagcggagggggctttggaccggttgctgatgacggctatggtgtgtcgtacatccttgtgggagagaacctcatcaatttccacatttcttccaagttctcttgccctgagacggattctcatcgctttggaaggcacctgaaagaagcaatgactgacatcatcactttgtttggtctcagttctaattccaaaaagtaattccactggagctgctgggaaggaaaacgag

SEQ ID NO: 86 - DNA, 3407 bp, Homo Sapiens
gctctgctccaggcatctgccacaatgtgggtgcttacacctgctgcttttgctgggaagctcttgagtgtgttcaggcaacctctgagctctctgtggaggagcctggtcccgctgttctgctggctgagggcaaccttctggctgctagctaccaagaggagaaagcagcagctggtcctgagagggccagatgagaccaaagaggaggaagaggaccctcctctgcccaccaccccaaccagcgtcaactatcacttcactcgccagtgcaactacaaatgcggcttctgtttccacacagccaaaacatcctttgtgctgccccttgaggaagcaaagagaggattgcttttgcttaaggaagctggtatggagaagatcaacttttcaggtggagagccatttcttcaagaccggggagaatacctgggcaagttggtgaggttctgcaaagtagagttgcggctgcccagcgtgagcatcgtgagcaatggaagcctgatccgggagaggtggttccagaattatggtgagtatttggacattctcgctatctcctgtgacagctttgacgaggaagtcaatgtccttattggccgtggccaaggaaagaagaaccatgtggaaaaccttcaaaagctgaggaggtggtgtagggattatagagtcgctttcaagataaattctgtcattaatcgtttcaacgtggaagaggacatgacggaacagatcaaagcactaaaccctgtccgctggaaagtgttccagtgcctcttaattgagggtgagaattgtggagaagatgctctaagagaagcagaaagatttgttattggtgatgaagaatttgaaagattcttggagcgccacaaagaagtgtcctgcttggtgcctgaatctaaccagaagatgaaagactcctaccttattctggatgaatatatgcgctttctgaactgtagaaagggacggaaggacccttccaagtccatcctggatgttggtgtagaagaagctataaaattcagtggatttgatgaaaagatgtttctgaagcgaggaggaaaatacatatggagtaaggctgatctgaagctggattggtagagcggaaagtggaacgagacttcaacacaccagtgggaaaactcctagagtaactgccattgtctgcaatactatcccgttggtatttcccagtggctgaaaacctgattttctgctgcacgtggcatctgattacctgtggtcactgaacacacgaataacttggatagcaaatcctgagacaatggaaaaccattaactttacttcattggcttataaccttgttgttattgaaacagcacttctgtttttgagtttgttttagctaaaaagaaggaatacacacaggaataatgaccccaaaaatgcttagataaggcccctatacacaggacctgacatttagctcaatgatgcgtttgtaagaaataagctctagtgatatctgtgggggcaaaatttaatttggatttgattttttaaaacaatgtttactgcgatttctatatttccattttgaaactatttcttgttccaggtttgttcatttgacagagtcagtattttttgccaaatatccagataaccagttttcacatctgagacattacaaagtatctgcctcaattatttctgctggttataatgcttttttttttttgcctttatgccattgcagtcttgtactttttactgtgatgtacagaaatagtcaacagatgtttccaagaacatatgatatgataatcctaccaattttcaagaagtctctagaaagagataacacatggaaagacggtgtggtgcagcccagcccacggtggctgttccatgaatgctggctacctatgtgtgtggtacctgttgtgtccctttctcttcaaagatcctgagcaaaacaaagatacgctttccatttgatgatggagttgacatggaggcagtgcttgcattgctttgttcgcctatcatctggccacatgaggctgtcaagcaaaagaataggagtgtagttgagtagctggttggccctacatctctgagaagtgacggcacactgggttggcataagatatcctaaaatcacgctggaaccttgggcaaggaagaatgtgagcaagagtagagagagtgcctggatttcatgtcagtgaagccaagtcaccatatcatatttttgaatgaactctgagtcagttgaaatagggtaccatctaggtcagtttaagaagagtcagctcagagaaagcaagcataagggaaaatgtcacgtaaactagatcagggaacaaaatcctctccttgtggaaatatcccatgcagtttgttgatacaacttagtatcttattgcctaaaaaaaaatttcttatcattgtttcaaaaaagcaaaatcatggaaaatttttgttgtccaggcaaataaaaggtcattttaatttagctgcaatttcagtgttcctcactaggtggcatttaaatgtcgcctgatgtcattaagcaccatccaaaaagtctgcttcataatctattttcaagacttggtgattctgaaagttttggtttttgtgactttgtttctcaggaaaaaaaatattcctacttaaattttaagtctataattcaatttaaatatgtgtgtgtctcatccaggataggataggttgtcttctattttccattttacctatttactttttttgtaagaaaagagaaaaatgaattctaaagatgttccccatgggttttgattgtgtctaagctatgatgaccttcatataatcagcataaacataaaacaaattttttacttaacatgagtgcactttactaatcctcatggcacagtggctcacgcctgtaatcccagcacttgggaggacaatgtgggtggatcacgaggtcaggagttcgagaacagcctggccaacatggtgaaaccccgtctccactaaaaatacaaaaattagccaggcatggtggcgtacacttgtaattccagctactcaagaggctgaggcaggaggattgcttgaaccctgaaggcagaggttacagagccaagatagcgccactgcactccagcctggatgacagagcaagactccgtctcaaaaaaaaaaaaaaaaaaaagcaagagagttcaactaagaaaggtcacatatgtgaaagcccaaggacactgtttgatatacagcaggtattcaatcagtgttatttgaaaccaaatctgaatttgaagtttgaatcttctgagttggaatgaatttttttctagctgagggaaactgtatttttctttccccaaagaggaatgtaatgtaaagtgaaataaaactataagctatgttaaataca

SEQ ID NO: 87 - DNA, 800 bp, Homo Sapiens
tatggtcattacaggtggtcagctgtagctggatgtgtgccttgaaaggctgacaagtttgccctgagtgactcacctactgtcacctgatccaacaagatttgtgggcgtagcctgccgatgggtgacgccagttaaagcatctctgagggtccccaaggaacatggctgggagccgtgaggtggtggccatggactgcgagatggtggggctggggccccaccgggagagtggcctggctcgttgcagcctcgtgaacgtccacggtgctgtgctgtacgacaagttcatccggcctgagggagagatcaccgattacagaacccgggtcagcggggtcacccctcagcacatggtgggggccacaccatttgccgtggccaggctagagatcctgcagctcctgaaaggcaagctggtggtgggtcatgacctgaagcacgacttccaggcactgaaagaggacatgagcggctacacaatctacgacacgtccactgacaggctgttgtggcgtgaggccaagctggaccactgcaggcgtgtctccctgcgggtgctgagtgagcgcctcctacacaagagcatccagaacagcctgcttggacacagctcggtggaagatgcgagggcaacgatggagctctatcaaatctcccagagaatccgagcccgccgagggctgccccgcctggctgtgtcagactgaagccccatccagcccgttccgcagggactagaggctttcggctttttgggacagcaactaccttgcttttggaaaatacatttttaatag

SEQ ID NO: 88 - DNA, 6271 bp, Homo Sapiens
gaaggcggcggcggccgcggaggagcaggacgcttggtccggacggagctcggcgctgggaagaagccgggagcttccctgatggtgccgccgcctccgagccggggaggagctgccaggggccagctgggcaggagcctgggtccgctgctgctgctcctggcgttgggacacacgtggacctacagagaggagccggaggacggcgacagagaaatctgctcagagagcaaaatcgcgacgactaaatacccgtgtctgaagtcttcaggcgagctcaccacatgctacaggaaaaagtgctgcaaaggatataaatttgttcttggacaatgcatcccagaagattacgacgtttgtgccgaggctccctgtgaacagcagtgcacggacaactttggccgagtgctgtgtacttgttatccgggataccgatatgaccgggagagacaccggaagcgggagaagccatactgtctggatattgatgagtgtgccagcagcaatgggacgctgtgtgcccacatctgcatcaataccttgggcagctaccgctgcgagtgccgggaaggctacatccgggaagatgatgggaagacatgtaccaggggagacaaatatcccaatgacactggccatgagaagtctgagaacatggtgaaagccggaacttgctgtgccacatgcaaggagttctaccagatgaagcagaccgtgctgcagctgaagcaaaagattgctctgctccccaacaatgcagctgacctgggcaagtatatcactggtgacaaggtgctggcctcaaacacctaccttccaggacctcctggcctgcctgggggccagggccctcccggctcaccaggaccaaagggaagcccaggcttccccggtatgccaggccctcctgggcagcccggcccacggggctcaatgggacccatgggaccatctcctgatctgtcccacattaagcaaggccggaggggccctgtgggtccaccaggggcaccaggaagagatggttctaagggggagagaggagcgcctgggcccagagggtctccaggaccccctggttctttcgacttcctgctacttatgctggctgacatccgcaatgacatcactgagctgcaggaaaaggtgttcgggcaccggactcactcttcagcagaggagttccctttacctcaggaatttcccagctacccagaagccatggacctgggctctggagatgaccatccaagaagaactgagacaagagacttgagagcccccagagacttctacccatagcacatcccaacaccgtcacgccaaaggaagagaaagatcaactcacctgcagttaaaccatctaaagagaagaaagaccactggagacctagaaaacatacatttttctcttctcttctcctgacgtctctccactcctcttcttccaaatacgatgctattttcagagtcccctcctaggcctgcagacatgagggagtgaatgattgatttacctgcttctcactaagagtccattggggtggtttgcattgtaacttttcttttacatcctatttttccaggaactttggatttaagtactctcacagtgtcttaaatcataaattcttgaagttaaatttggcagagtatcaaaagggggaaaatgacaaagtgagctctaagaaaatgtgaggctacttctaagatgtgtgttcacaatagaccataactcctctagtatcaaaattggggctcttcagttaaaaaggggtggggaggacaaacgtgtcgatgtgctttggtggagaattttttccttgtgcttctagtagactttaaatattgtatccctttgtcaaaccttgtttcccaaattcaattaaagagaggagagaattgaatggcgtttagagaagatagaaaagaatcacagtcatatatttactgttatatagattgccacattctaaaattcaaatacggtgcttaaggtttcatgccatgcttatctgtaagtatcctatttagggaagaagattaaactctcttttcaaaaaaacaaagtgaaatgcctggattcacattaaaacaatgggctctcgtttgctataatattttaaagctgtttaatcaacagtggagtctgctctataaatatagattatttgttcaataaactggctgagcttagagagaggtgcagaattcctggttctgagcaggtgcccagaaggtaccattaggtgccatgatccaggctgaaccaatatacagtggggctgaagtctgcaaggaggttgctggcttgggctgacctcactaatgccatcagcagcggtaggtaaattttttctccttgggtattacaagtttttgtctggagccaaccaagcttgccaccaacatattgagagtaatacactattgaaagttatcttggatggggagaaaaaaaaatagtggttttccttgtttgcaaaaacttccttcctattctcattttttcttaattttctttaatttagtccaagttccagttcttttaggccttctctttgatttattttcccctgcatgtgagaagcagttcagaaaaaggtctatatctccacctcctagtgagttagagtgttttctcagagcacctctgggtggcaaagggaagcatgttcctgccaaggtttgctgtggattcagaagcaccaggagcaagagaccagaaggatgatctgctcctttgtaacgttgttgagggccctcttgtttccaatgagcagcttataggttactcacagtccactttctcactggacacacaaagtggctctttatctacctttgcgggagattttcactctcctgcaaatgatcgttctcacactcatattagctcatgttggaatttcccatcctgccatgtcctttcccatttctttttggcttttttgcctccaccttttagcccacatcatttaactccactactgtgaaagcttgcttaaagaaaatccctcttggccgggtgtggtagcccacgcctctaatcccagcactttgggaggctgaggcggggagatcacaaggtcaggagatcgagaccagcctgaccaacatggtgaaaccctgtctctactaaaaatacaaaaattagctgggcgtgttggcacacacctgtaatcccagctactcaggaggctgaggcaggagaattactttaacctgcggggggagcctagattgcgctactgcactccagcctaggcaacagagggagactctgtctcattaaaaaaaaaaaaaaaaaaaaaaaaaggccgggcttggtggctcatgcctgtaatcccagcactttgggaggccgaggcgggcggatcacgaggtcaggagatcgagaccacagtgaaaccctgtctctactaaaaacacaaaaaattagtcgggcgtggtggtgggcgcctgtggtcccagctgctcgggaggctgaggcaggagaatggcgtgaacctgggaggcggagcttgcgctgagccgagatcgtgccactgcactccagcctgggcgacagagcgagactctgtctcaaaaaaaaaaaaatatcccttttgttgtgtttgaatgccacctttcagtcttcttccttaagaatgttaggaaggggctttgcaaacctctagtggcaacagtcttccttcccttcttcctaccacgttggaaatgcaggactcatgtcagtcagcatgtgaccgagtctttcatgaacactttgctcctctatgtctcatttatgcaaaattcctggtgactctccactaacatttttaaagtgaaagcaaactttcactttaaaaaaagtgagcgagaggatcccttgagcccaggagttcaaggccagtctgggcaacatagcaagaccccatccctaaaaaaaaaaaaataagttttattaaatgtggcactttcccctagaagggcagtaaccccaggaaccagtctgcctcttttcgaataaaggagactttttaaaaagaaaaaatttctttttagggtggggtgctctttatctagcatctttccttcctccttctctctgcaaaattcaacattcatgacagagggccacaccaaccacgggtttatagagagaggaactgaacagctgttgattcccatctggaatatatttaatgtttgcctgcttgtggagcatggtatttaaagggtgtggatggatgaatgtttaaaaaaaaacacacaaaactatgcacaagctgtatgagagatggctaggtccatctatgattttttttaaaagaagaattttaataccttttctttgacagtgaactgtatttagaaatatgatctttattgtgaaatgctcataaaatgcaaccaaactgcatgtttggccataggctagaataatatattaaaagaattaatggaaagtagtattgtctgggtttcatgaaactattccagataatattctccagcaaaacttatggtaacctgtattttataatgtcaatctgctggaccaagttaatttagaaaataatttttaatcctcagattttcaaaacttggactactgcaagactgatatgtactttttatgcccaaatcatatttttcaaagataggacatcataaggcatcattatttctaatgtatcttttaactagatagaaaaagctttactgtctaaacaggacttctgctcaaaacctaatgggaaagctatttctggggtaagatttgtaacagtgcttctaggtcatttcatgttttatagggaaaaagatctttgtacacctcctcaacctgttagtagaaatgttgacttcgattttttgcaccctcttcacaggacctcataagttgcctctgttcttggaaagcaatgggaataaaaatatgctgttgaaaatagtgcatggggccaggcacagtggttatgcctgtaatcccaacactttgggaggctgaggcgggcgcatcatgaggtcaggagatcaagaccatcctgaccaacacgtggtgaaaccccatctctactaaaataaataaaaaaaaaaattagccaggcgtggtggtgcacgcctgtagtctcagctactcgggaagctgagacacaagaattgcttgaacccgggaggtggaggttgcagtgagccaagattgcgccactgcactccagcctggctacagagtgagactccgtctcgaaaaaagaaaatagtacatggagggcatgcattttagtttaggaaacccccctcccttcccagttccagagggagaaattataagctatactgtgccaaaagtgagtggggctgcagagagaatggtgccttttctcaccttctgagttaatgcccgacatctgccattggattcattgaccaaaggaagtcatttctactgtataaactcaggagtatcatagcccaacaagtaaataataaatgttcattggttttggaaggaaggaaaggtgagtattaccccaccaaataccagcgaagagcaccctggctttggccatctttccaaggttcataattgctgtgggcctggtgagccctgttcccaggtatgcaagggagggcttctccaggccagacatttctgtaggttttcaggtagcaactcccccatcatattttgggtgtcattccccactctctctccccacttctcagcctgtgccccagaaacaaccacagcagcctcattctgcagacttaacatctgtcaaataaccttcctgaaaaggaaagttattggaggaatccaggccaaacaacaagtagaatagagccatctaaagttattaataatgagttcagggaaatagatgaattttttcctggcatagtcaatatttatatctcacaacaagtcaaaaataattttccatttggaaaacaaaacacaccatgactgtaattgttaaggcatataatcatgaacttcacatgctccctcaacaaacgttactgctctagggaaatcatagaaaaggaccctcttactccccaggggatcaaagcaagtccccttaggaatttcatgtgtgccgtgggtctgtttttatttcacagtgactagtcatatactggagtagctctgttgttcattatttgtaacaggtccatgtaacagtcaagttagcattcaagcaattatggatgtgatactatgatgtacttttgttatgattgtatatgcttaataacaaagttatttttctta

SEQ ID NO: 89 - DNA, 4170 bp, Homo Sapiens
cgctccacctctcaagcagccagcgcctgcctgaatctgttctgccccctccccacccatttcaccaccaccatgacaccgggcacccagtctcctttcttcctgctgctgctcctcacagtgcttacagttgttacgggttctggtcatgcaagctctaccccaggtggagaaaaggagacttcggctacccagagaagttcagtgcccagctctactgagaagaatgctgtgagtatgaccagcagcgtactctccagccacagccccggttcaggctcctccaccactcagggacaggatgtcactctggccccggccacggaaccagcttcaggttcagctgccacctggggacaggatgtcacctcggtcccagtcaccaggccagccctgggctccaccaccccgccagcccacgatgtcacctcagccccggacaacaagccagccccgggctccaccgcccccccagcccacggtgtcacctcggccccggacaccaggccggccccgggctccaccgccccccaagcccacggtgtcacctcggccccggacaccaggccggccccgggctccaccgcccccccagcccacggtgtcacctcggccccggacaccaggcccgccccgggctccaccgcccccccagcccacggtgtcacctcggccccggacaccaggtccgccccgggctccaccgcgcccgcagcccacggtgtcacctcggccccggacaccaggtcggtcccgggctccaccgccccccaagcccacggtgtcacctcggccccggacaccaggccggccccgggctccaccgcccccccagcccacggtgtcacctcggccccggacaccaggccggttccgggctccaccgcccccccagcccacggtgtcacctcggccccggacaccaggccggccccgggctccaccgcccccccagcccacggtgtcacctcggccccggacaccaggccggccccgggctccaccgccccccaagcccacggtgtcacctcggccccggacaccaggccggccccgggctccaccgcccccccagcccacggtgtcacctcggccccggacaccaggcccgccccgggctccaccgcccccccagcccacggtgtcacctcggccccggacaccaggcccgccccgggctccaccgcgcccgcagcccacggtgtcacctcggccccggacaccaggccggccccgggctccaccgccccccaagcccacggtgtcacctcggccccggacaccaggccggccccgggctccaccgcccccccagcccacggtgtcacctcggccccggacaccaggccggccccgggctccaccgcccccccagcccacggtgtcacctcggccccggacaccaggcccgccccgggctccaccgcccccccagcccacggtgtcacctcggccccggacaccaggcccgccccgggctccaccgcgcccgcagcccacggtgtcacctcggccccggacaccaggccggccccgggctccaccgccccccaagcccacggtgtcacctcggccccggacaccaggccggccccgggctccaccgcccccccagcccacggtgtcacctcggccccggacaccaggccggccccgggctccaccgcccccccagcccacggtgtcacctcggccccggacaccaggccggccccgggctccaccgcccccccaacccacggtgtcacctcggccccggacaccagtcccgccccgggctccaccgcccccccagcccacggtgtcacctcggccccggacacaaggcccgccccgggctacaccgcgcccgcagcccacggtgtcacctcggccccggacaccaggccggccccgggctccaccgccccccaagcccacggtgtcacctcggccccggacaccaggccggccccgggctccaccgcccccccagcccacggtgtcacctcggccccggacaccaggccggccccgggctccaccgcccccccagcccacggtgtcacctcggccccggacaccaggccggccccgggctccaccgcccccccagcccacggtgtcacctcggccccggagagcaggccggccccgggctccaccgcgagagcagcccacggtgtcacctcggccccggagagcaggccggccccgggctccaccgcccccccagcccacggtgtcacctcggccccggacaccaggccggccccgggctccaccgcccccccagcccacggtgtcacctcggccccggacaccaggccggccccgggctccaccgcccccccagcccacggtgtcacctcggccccggacaccaggccggccccgggctccaccgcccccccagcccacggtgtcacctcggccccggacaccaggccggccccgggctccaccgcccccccagcccacggtgtcacctcggccccggacaccaggccgtccccgccgggctccaccgcccccccagcccacggtgtcacctcggccccggacaccaggccggccccgggctccaccgcccccccagtccacggtgtcacctcggccccggacaccaggccggcaccgggctccaccgcccccccagcccacggtgtcacctcggccccggacaccaggccggccccgggctccaccgcccccccagcccacggtgtcacctcggccccggacaccaggccggccccgggctccaccgcacccccagcccacggtgtcacctcggccccggacaccaggcgggccccgggctccaccccggccccgggctccaccgcccccccagcccacggtgtcacctcggccccggacaccaggccggccccgggctccaccgcccccccagcccatggtgtcacctcggccccggacaacaggcccgccttgggctccaccgcccctccagtccacaatgtcacctcggcctcaggctctgcatcaggctcagcttctactctggtgcacaacggcacctctgccagggctaccacaaccccagccagcaagagcactccattctcaattcccagccaccactctgatactcctaccacccttgccagccatagcaccaagactgatgccagtagcactcaccatagcacggtacctcctctcacctcctccaatcacagcacttctccccagttgtctactggggtctctttctttttcctgtcttttcacatttcaaacctccagtttaattcctctctggaagatcccagcaccgactactaccaagagctgcagagagacatttctgaaatgtttttgcagatttataaacaagggggttttctgggcctctccaatattaagttcaggccaggatctgtggtggtacaattgactctggccttccgagaaggtaccatcaatgtccacgacgtggagacacagttcaatcagtataaaacggaagcagcctctcgatataacctgacgatctcagacgtcagcgtgagtgatgtgccatttcctttctctgcccagtctggggctggggtgccaggctggggcatcgcgctgctggtgctggtctgtgttctggttgcgctggccattgtctatctcattgccttggctgtctgtcagtgccgccgaaagaactacgggcagctggacatctttccagcccgggatacctaccatcctatgagcgagtaccccacctaccacacccatgggcgctatgtgccccctagcagtaccgatcgtagcccctatgagaaggtttctgcaggtaatggtggcagcagcctctcttacacaaacccagcagtggcagccacttctgccaacttgtaggggcacgtcgcccgctgagctgagtggccagccagtgccattccactccactcaggttcttcagggccagagcccctgcaccctgtttgggctggtgagctgggagttcaggtgggctgctcacagcctccttcagaggccccaccaatttctcggacacttctcagtgtgtggaagctcatgtgggcccctgagggctcatgcctgggaagtgttgtggtgggggctcccaggaggactggcccagagagccctgagatagcggggatcctgaactggactgaataaaacgtggtctcccactgcgcc

SEQ ID NO: 90 - DNA, 2526 bp, Homo Sapiens
agtcccaccgaaagggcaacctgcccgcgcgttccgccgccgccgccgcgcttcctcctgaaggtgactgcgcccgcggggacgcagggggcggggcccgggtcgcccggagccgggattgggcagagggcggggcggcggagggattgcggcggcccgcagcgggataaccttgaggctgaggcagtggctccttgcacagcagctgcacgcgccgtggctccggatctcttcgtctttgcagcgtagcccgagtcggtcagcgccggagctctccagggcacaccgtattcagctctgagcggtctttgctagtgaggccaaggagccaccctgagccaaaaggggagcattatgtcaccggaagcccaaccccagagaaccaaaggacctcagcagccatgtcgaagccccatagtgaagccgggactgccttcattcagacccagcagctgcacgcagccatggctgacacattcctggagcacatgtgccgcctggacattgattcaccacccatcacagcccggaacactggcatcatctgtaccattgtaccatgcggagaccatcaagaatgtgcgcacagccacggaaagctttgcttctgaccccatcctctaccggcccgttgctgtggctctagacactaaaggacctgagatccgaactgggctcatcaagggcagcggcactgcagaggtggagctgaagaagggagccactctcaaaatcacgctggataacgcctacatggaaaagtgtgacgagaacatcctgtggctggactacaagaacatctgcaaggtggtggaagtgggcagcaagatctacgtggatgatgggcttatttctctccaggtgaagcagaaaggtgccgacttcctggtgacggaggtggaaaatggtggctccttgggcagcaagaagggtgtgaaccttcctggggctgctgtggacttgcctgctgtgtcggagaaggacatccaggatctgaagtttggggtcgagcaggatgttgatatggtgtttgcgtcattcatccgcaaggcatctgatgtccatgaagttaggaaggtcctgggagagaagggaaagaacatcaagattatcagcaaaatcgagaatcatgagggggttcggaggtttgatgaaatcctggaggccagtgatgggatcatggtggctcgtggtgatctaggcattgagattcctgcagagaaggtcttccttgctcagaagatgatgattggacggtgcaaccgagctgggaagcctgtcatctgtgctactcagatgctggagagcatgatcaagaagccccgccccactcgggctgaaggcagtgatgtggccaatgcagtcctggatggagccgactgcatcatgctgtctggagaaacagccaaaggggactatcctctggaggctgtgcgcatgcagcacctgattgcccgtgaggcagaggctgccatctaccacttgcaattatttgaggaactccgccgcctggcgcccattaccagcgaccccacagaagccaccgccgtgggtgccgtggaggcctccttcaagtgctgcagtggggccataatcgtcctcaccaagtctggcaggtctgctcaccaggtggccagataccgcccacgtgcccccatcattgctgtgacccggaatccccagacagctcgtcaggcccacctgtaccgtggcatcttccctgtgctgtgcaaggacccagtccaggaggcctgggctgaggacgtggacctccgggtgaactttgccatgaatgttggcaaggcccgaggcttcttcaagaagggagatgtggtcattgtgctgaccggatggcgccctggctccggcttcaccaacaccatgcgtgttgttcctgtgccgtgatggaccccagagcccctcctccagcccctgtcccacccccttcccccagcccatccattaggccagcaacgcttgtagaactcactctgggctgtaacgtggcactggtaggttgggacaccagggaagaagatcaacgcctcactgaaacatggctgtgtttgcagcctgctctagtgggacagcccagagcctggctgcccatcatgtggccccacccaatcaagggaagaaggaggaatgctggactggaggcccctggagccagatggcaagagggtgacagcttcctttcctgtgtgtactctgtccagttcctttagaaaaaatggatgcccagaggactcccaaccctggcttggggtcaagaaacagccagcaagagttaggggccttagggcactgggctgttgttccattgaagccgactctggccctggcccttacttgcttctctagctctctaggcctctccagtttgcacctgtccccaccctccactcagctgtcctgcagcaaacactccaccctccaccttccattttcccccactactgcagcacctccaggcctgttgctatagagcctacctgtatgtcaataaacaacagctgaagcacc

SEQ ID NO: 91 - DNA, 1639 bp, Homo Sapiens
gttccaggagccccagttaccgggagaggctgtgtcaaaggcgccatgagcaagatcagcgaggccgtgaagcgcgcccgcgccgccttcagctcgggcaggacccgtccgctgcagttccggatccagcagctggaggcgctgcagcgcctgatccaggagcaggagcaggagctggtgggcgcgctggccgcagacctgcacaagaatgaatggaacgcctactatgaggaggtggtgtacgtcctagaggagatcgagtacatgatccagaagctccctgagtgggccgcggatgagcccgtggagaagacgccccagactcagcaggacgagctctacatccactcggagccactgggcgtggtcctcgtcattggcacctggaactaccccttcaacctcaccatccagcccatggtgggcgccatcgctgcagggaactcagtggtcctcaagccctcggagctgagtgagaacatggcgagcctgctggctaccatcatcccccagtacctggacaaggatctgtacccagtaatcaatgggggtgtccctgagaccacggagctgctcaaggagaggttcgaccatatcctgtacacgggcagcacgggggtggggaagatcatcatgacggctgctgccaagcacctgacccctgtcacgctggagctgggagggaagagtccctgctacgtggacaagaactgtgacctggacgtggcctgccgacgcatcgcctgggggaaattcatgaacagtggccagacctgcgtggcccctgactacatcctctgtgacccctcgatccagaaccaaattgtggagaagctcaagaagtcactgaaagagttctacggggaagatgctaagaaatcccgggactatggaagaatcattagtgcccggcacttccagagggtgatgggcctgattgagggccagaaggtggcttatgggggcaccggggatgccgccactcgctacatagcccccaccatcctcacggacgtggacccccagtccccggtgatgcaagaggagatcttcgggcctgtgctgcccatcgtgtgcgtgcgcagcctggaggaggccatccagttcatcaaccagcgtgagaagcccctggccctctacatgttctccagcaacgacaaggtgattaagaagatgattgcagagacatccagtggtggggtggcggccaacgatgtcatcgtccacatcaccttgcactctctgcccttcgggggcgtggggaacagcggcatgggatcctaccatggcaagaagagcttcgagactttctctcaccgccgctcttgcctggtgaggcctctgatgaatgatgaaggcctgaaggtcagataccccccgagcccggccaagatgacccagcactgaggaggggttgctccgcctggcctggccatactgtgtcccatcggagtgcggaccaccctcactggctctcctggccctgggagaatcgctcctgcagccccagcccagccccactcctctgctgacctgctgacctgtgcacaccccactcccacatgggcccaggcctcaccattccaagtctccacccctttctagaccaataaagagacgaatacaattttctaactca

SEQ ID NO: 92 - DNA, 819 bp, Homo Sapiens
acacagaaggcggggcgcggggagggtggggagaccacagcagtgaggcgcgcgagccgggaagtgaacgaggactgactcctgtcgcttcccgtagccgcccacggacgccagagccgggaaccctgacggcacttagctgctgacaaacaacctgctccgtggagcgcctgaaacaccagtctttggggccagtgcctcagtttcaatccaggtaacctttaaatgaaacttgcctaaaatcttaggtcatacacagaagagactccaatcgacaagaagctggaaaagaatgatgttgtccttaaacaacctacagaatatcatctataacccggtaatcccgtttgttggcaccattcctgatcagctggatcctggaactttgattgtgatacgtgggcatgttcctagtgacgcagacagattccaggtggatctgcagaatggcagcagcatgaaacctcgagccgatgtggcctttcatttcaatcctcgtttcaaaagggccggctgcattgtttgcaatactttgataaatgaaaaatggggacgggaagagatcacctatgacacgcctttcaaaagagaaaagtcttttgagatcgtgattatggtgctgaaggacaaattccaggttccaaagtctggcacgccccagcttaggctgccattcgctgcaaggttgaacacccccatgggccctggacgaactgtcgtcgttaaaggagaagtgaatgcaaatgccaaaagctttaatgttgacctactagcaggaaaatcaaaggatattgctctacacttgaacccacgcctgaa

SEQ ID NO: 93 - DNA, 1835 bp, Homo Sapiens
aattagaggattaggcaattggcagcgcagggcggtaactctgggcggggctgggctccagggctggacagcacagtccctctgaactgcacagagacctcgcaggccccgagaactgtcgcccttccacgatgtggctccgtgcctttatcctggccactctctctgcttccgcggcttgggggcatccgtcctcgccacctgtggtggacaccgtgcatggcaaagtgctggggaagttcgtcagcttagaaggatttgcacagcctgtggccattttcctgggaatcccttttgccaagccgcctcttggacccctgaggtttactccaccgcagcctgcagaaccatggagctttgtgaagaatgccacctcgtaccctcctatgtgcacccaagatcccaaggcggggcagttactctcagagctatttacaaaccgaaaggagaacattcctctcaagctttctgaagactgtctttacctcaatatttacactcctgctgacttgaccaagaaaaacaggctgccggtgatggtgtggatccacggaggggggctgatggtgggtgcggcatcaacctatgatgggctggcccttgctgcccatgaaaacgtggtggtggtgaccattcaatatcgcctgggcatctggggattcttcagcacaggggatgaacacagccgggggaactggggtcacctggaccaggtggctgccctgcgctgggtccaggacaacattgccagctttggagggaacccaggctctgtgaccatctttggagagtcagcgggaggagaaagtgtctctgttcttgttttgtctccattggccaagaacctcttccaccgggccatttctgagagtggcgtggccctcacttctgttctggtgaagaaaggtgatgtcaagcccttggctgagcaaattgctatcactgctgggtgcaaaaccaccacctctgctgtcatggttcactgcctgcgacagaagacggaagaggagctcttggagacgacattgaaaatgaaattcttatctctggacttacagggagaccccagagagagtcaaccccttctgggcactgtgattgatgggatgctgctgctgaaaacacctgaagagcttcaagctgaaaggaatttccacactgtcccctacatggtcggaattaacaagcaggagtttggctggttgattccaatgcagttgatgagctatccactctccgaagggcaactggaccagaagacagccatgtcactcctgtggaagtcctatccccttgtttgcattgctaaggaactgattccagaagccactgagaaatacttaggaggaacagacgacactgtcaaaaagaaagacctgttcctggacttgatagcagatgtgatgtttggtgtcccatctgtgattgtggcccggaaccacagagatgctggagcacccacctacatgtatgagtttcagtaccgtccaagcttctcatcagacatgaaacccaagacggtgataggagaccacggggatgagctcttctccgtctttggggccccatttttaaaagagggtgcctcagaagaggagatcagacttagcaagatggtgatgaaattctgggccaactttgctcgcaatggaaaccccaatggggaagggctgccccactggccagagtacaaccagaaggaagggtatctgcagattggtgccaacacccaggcggcccagaagctgaaggacaaagaagtagctttctggaccaacctctttgccaagaaggcagtggagaagccaccccagacagaacacatagagctgtga

SEQ ID NO: 94 - DNA, 5396 bp, Homo Sapiens
atggagccccgggctgccgcggcgggcgagccagagccgccggcggcgtcctcctccttccaggcccggctctggaagaacctgcagctgggggtgggcaggagcaagggcggcgggggcgggcgcgctgggggtccagagcgccgcactgcggacaccccgtcgccctccccgccacccccggtgggcacagggaatgcaccggccagggggagtggtgcaggcagcaggtggagcggcttcaagaagcggaagcaagtgctggaccgagtcttctcctcctcgcagcccaacctgtgctgctcgtcgccggagcccctggagcccggcggcgccggcagagccgagcaggggtccacgctacgccgccggatccgcgagcatttgctccccgccgtaaaggggcccgcggcggcctcgggagcagcgggagggacgcctcctggcggacgctcccccgactcagctccttcctcttcctccgcctcatcctccctgtcctcctcgccccagcctcccccgaggggggaccgcgcccgagatgagggtgcacggcgtcagggccccggggcgcacttgtgccaccagaagagctcctctctgccgggcaccgcctgcctggagcagctgctggagccgccgcctcctcccgcagagccggcgcggagtcccgcggagtctcgggccccggagacgggcgaggagcacggcagcagccagaaaataataaacactgctggaaccagtaatgcagaagtccccttggctgatcccggaatgtaccagctggacattacattaagaaggggtcaaagtttagctgctcgagatcgaggagggacgagtgatccatatgtgaagtttaaaatcggaggaaaagaagtttttagaagtaagataatacacaagaacctcaaccctgtgtgggaagaaaaagcttgtattctggttgatcatcttagggagccattgtatataaaggtatttgactatgattttggactacaggatgactttatgggctcagcctttctggatctgacacaattggagttaaacaggcccacagatgtgacccttactctgaaagatcctcattatcctgaccatgatcttggaatcattttgctctcagtcatccttacccctaaagaaggagagtccagggatgtgacaatgctaatgaggaagagttggaaaagatcaagtaaggaactttcagaaaatgaagtggttggatcttatttctctgtgaagtctctcttttggaggacgtgcggcaggccagctcttcctgtcctgggcttctgcagagcagagcttcagaatccttattgcaaaaatgtacaatttcagacccaaagtttacgcctatcagacctacacagaaaatcgcatctttggagaggaatagtcagcatcaccttgattgaagggagagacctcaaggccatggattccaacgggttgagcgatccctacgtgaagttccggcttgggcatcagaagtacaagagcaagattatgccaaaaacgttgaatcctcagtggagggaacaatttgattttcacctttatgaagaaagaggaggagtcattgatatcactgcatgggacaaagatgctgggaaaagggatgatttcattggcaggtgccaggtcgacctgtcagccctcagtagggaacagacgcacaagctggagttgcagctggaagagggtgagggacacctggtgctgctggtcactctgacagcatcagccacagtcagcatctctgacctgtctgtcaactccctggaggaccagaaggaacgagaggagatattaaagagatatagcccattgaggatatttcacaacctgaaagatgtgggatttctccaggtgaaagtcatcagagcggaagggttaatggctgccgacgtcactggaaaaagtgacccattttgtgtggtagaactgaacaacgatagactgctaacacatactgtctacaaaaatctcaatcctgagtggaataaagtcttcacgttcaacattaaagatatccattcagttcttgaagtgacagtttatgatgaagatcgggatcgaagtgctgactttctgggcaaagttgctataccattgctgtctattcaaaatggtgaacagaaagcctacgtcttgaaaaacaagcagctgacagggccaacaaagggggtcatctatcttgaaatagatgtgatttttaatgctgtgaaagccagcttacgaacattaatacccaaagaacagaagtacattgaagaggaaaacagactctctaaacagctgctactaagaaactttatcagaatgaaacgttgtgtcatggtgctggtaaatgctgcatactacgttaatagttgctttgattgggattcacccccaaggagtctcgctgcttttgtgctctttctctttgttgtctggaactttgagctctacatgataccactggttttgttgttactattgacatggaactacttcttgataatatcagggaaagataacaggcaacgtgatacagtagtggaggacatgctagaggacgaggaagaagaagatgacaaagatgacaaggacagtgaaaaaaagggatttataaataaaatctatgccatccaggaggtatgtgtcagtgtccagaacatcctagatgaagtggcttcctttggcgaaaggataaagaatactttcaactggactgtcccattcttaagctggctggccattgtagccctctgtgtgttcacagccatcctgtactgcattccgctgagatacattgtccttgtctggggcatcaataaatttacaaaaaagcttcggagtccatatgcaattgataacaatgaactacttgacttcctttccagagtcccttcagatgtacaagtggtgcaataccaagaactgaaaccagatccttctcatagcccatataaaagaaagaaaaacaatcttggctagccagctcccagcactgaggagaccagcatctgtttgggaagataaaagaaaaagccctcagcctcagcagcatttcctttctttctgctttttatttattttgcctttttatcatgatcgagagaatctgtaaatagtgtacaaaggcatatgtctttgaatatatacttctattgtacagactcaacttgataaaggttttgctactgctgtgtcaaaaccttgttagctgtggataataatataacacactgaaagaacaaatataagaatgataacactggaagatatattcttatctaattactagtggattaaatactcacctgtgctctgattaaatctacatcaattgtaaatgtcgatttgattttaaagtttttttttaatgcgactattttttatctgaaaagtaatccattacacttttctatgttttatacatttcaaaagggagggaaattccaaagcctgaataatggaatggatacatttcaatttaacatatattctggctttagatcccgacattcactcctgtgcaaattacttaggtatgacttaggctaattttaagctaataagtgaaggtacattcactccctcaagagaatcaatactcagaaggttacaaagttttctttatagaatttcaatcaatcattccatctaaaaccttaaaatctctacaggactacataacataaatactgccagtttataaacgattgcctatctgaatttttatacctaccactactttaatttatacagttagttagcaaattagcaacccagtaagtacagttatcaaaaatactaggaaactatatccatatcgcttttggtgtcagattgtatctgtgcatctaaaaatattttaataaatactcaagtgctctcagagaaaaaaaaaacctgctttctcattagattactgaaatgctttaattcatactatgattttgttattagtgtgaattttaatgtagagaattcagtgtgctaagtgatatgccagtgtttcactacattcatttattaaaaaaaatcattcttgattatgcatgaaaacctgttttgtaaaataaaataaactgcttgggggtggtggttgcctttatcaatgtttcactattatcatagaatctatacttaaaaattgcattcccaagactcttaaagtagtttttatatctcactccctggtatactaagggagcataactctggagaaaaaataatttggttggttgagaatgtcttacttccctgacttggtaggggactacactcagttgaaattgcagcagacaatgctttgcactactttattaataataaacttggatggggtaaaagtgggggttatactggaaaaactatagaaaagctaaaagaaatgtatatttcactctaaaggaagattctttaacaataaatgtaatctcattgaagctgatttttaaagtatttttattttagagataagttgttaaatactatttcttataatagaactattttgatctgtttatatactatgcttgaatgtcaattaaattccctttctacagaaaggctttgacctcaacatgctttatttaatgtatcatgtttaaaatgacatgcttctgtctgcataccatcactgtttgttgctaaaaacataatgttccatgaacatgatgttactacagaaagtttattgatgagataactgtttgaaataactttcaattataccttatgtgagacttttatgttctgtgctgacaatgtgtactcaaatgtctataagcctgatattctacaacctcagatgtatctagtggatagtaaccattaacagatgactaatttgtttcactgtatcaaatttcagatgtttagttcaatggtaatgctgactacacattcactgtattaaatacaaaagaaaataatctttcccacgtataatcagcactccttttttttttttttttggtggttcagagattgatgagggattgtgtgcatattcttaaaaactatatgtcacttggagaaaaacagatttggtttaaacaaataagacctttttcctgaaactctgactcttatatgaaaatacctctggaggggtgagcaaccaatgacattaacagaggaataagaactagcttgaggcacaaaagtgatattcagggaaatcttcattgcttttagaaactactacattcacaggctgaaaacagaatatgtatagttaaaattttaactatttatttctttccccttctcacatagctgcaattctgtcttgagagctgcctgacttgccttcattttgagatctgtgatgtaaatatttcttaagagactgaatgtcactcaaacatctacttggactg

SEQ ID NO: 95 - DNA, 6080 bp, Homo Sapiens
agtcgcgtcaagcaggctattccgggtttgtggctgcttggctccacacgtgggccgccgtaggtattccgaccggtaattcctcctattggtgtgcagcagccacattgaaggatagagtggcagcagaggccaaggatcgtgagttgatggagtttgctgctgaaaatgaagggaagtctgggggaggtctccacagcgtagctgagggggtgcggctaagtccagagcctggcagggagggagtaagggacttagcaggggcggaggagttcggcggcggagaggaggggacagggctgacagggataaaggagataggggatggagaggaaggaagtggacaaaggccagaggaaataccgatggacctaacggtagtgaagcaggagacggatagtagtttagtggtaaaagaagcgaaggtgggtgaaccagaggtaaaggaagagaaggtaaaggaagaggtaatggactggtcagaagtgaaggaagagaaggataacttggagataaaacaggaggagaagtttgttggtcaatgcataaaagaggaattgatgcatggagagtgtgtaaaagaagagaaggatttcctgaagaaagaaatcgtggatgatacaaaggtgaaagaagagcctccgataaatcacccggtgggctgcaagcggaaactggccatgtcaaggtgtgagacttgtggtacagaagaagcaaagtacagatgtccacgttgtatgcgatattcctgcagtttgccctgtgtaaagaaacacaaagcagaactgacatgtaatggagttcgagataaaactgcatacatttcaatacaacagtttactgaaatgaatctcctaagtgattatcgatttttggaagatgtggcaagaacagcggaccatatttctagagatgcttttttgaagagaccaataagcaataaatatatgtactttatgaaaaatcgtgcccggaggcaaggtattaacttaaaacttctacccaatggattcaccaagaggaaggagaattcaaccttttttgataagaaaaaacaacagttttgttggcatgtgaagctccagtttcctcaaagtcaagctgagtacatagaaaaaagagtaccagatgataaaactattaatgaaatcctaaaaccttacattgatcctgaaaagtctgatcctgtaattcgtcaaaggttgaaagcctacattcgctctcagactggggttcagattttaatgaagattgaatatatgcagcaaaatttagtaagatattatgaactagatccttataaaagtctcctagacaatttgaggaacaaagtgatcattgagtatccaacattacatgtggtattgaaaggatccaataatgacatgaaagttcttcaccaagtgaagagtgaatctaccaagaacgttggcaatgaaaattgagcattttttctggaagaagaaagtgaaaacttccagacaactgcagcagactctgcattgatgggctgttggctgattggggtattgtcaatgggtgattggaattttttctttgtatgaaaaataagcttaactcttttaaaaaatgtattttataacctcttgaattaattgacttgtaagacccatttattcatattaagaactctcctttgcacttgatcagcatagtacttattaggccctggctttttaatatgcttaattgcttaattccataaactgaaaactttttttttcttttttctttctttttttgagatggggtcttggagtgcaagtggtatgagcatagcttcctcaaattcctgggctcgaatggtcctctcactgcagcctcccaacaggctggtaccaccacactcagctaagttttttgttgttgtttttttttggtagagacagggttgcgctctttcgcccaggctggtctcaaatttgtggcctcaagcaatccttccacctcagactccaaagcattgggattacaggcatcagccaccacacctggccttgaacattttttatttgttaatttcatgcgtgacgaaacccaaggatcacccatgtcaaccacaaagttggcattccctttagtagaacctcactaaacggaaaggctgtacaacgcaccgtctagccacaggagaactaatcttctatcagttgccctttcttctttggagtttttatgtaacttacccttgtgagacaagttttctacttgagaaactcctagtacaatgtcttatactagaagcctggataaatactattaactactgtttcttatattcacttcagaaaatcagtggctccacattgtttgagccattagtgataacaaatttggatctacttactcaagtcttatgaattctgtgcctttcatcacattcctagcccactctcatcattactgcagaagggtgttgtgatgaccagttttatactgtgttttgatatgtctagcaataacttaaagaaaaaaaaacctgggaaatcttcaacatgttattggaacatatatgtatgtattaatgtatatacatggcttaacttatacgttatggcagctctgtatacagtttgatctcatgtactgaaaaaaaattcttaattttattggagtttataccactgtgaaactgcaatatgactgtaagagagtaaaaagattgttacatctatattgtatgtgtgtacttaatggttaaaaagcaatgataaaactggacattaatgaaattgatttttagttacagttggaataagttttttaccaaaaagaaaccagagacgttagttaaggagacttaaaaagatctgaaatatgaaaagagaatgagaagatgagcagaagataaatttgtgggacacaagtataacttggggtagaaactggagaagagaatcgaaaaacaataatgccagaaggacccttggtatgaaagtactaatggaatgtgattcatagaaagttcatagaaagtgagtccttgcaacttgagaaacatacatacatatatatttataatctctaaagcaacatcaggaatcttctaatatatgataaagaatttgtgtagaattacgttgttcacagtattattggagagacaaataagatttcaaggaattcatttataatcaaaagtgaaatgtgtcttcttgaaaccagcaagaaatagatgaattgagtgaaacgtgttgttattaggagaagtgggataacgtatacaaaaagaacttgcgatctgaatatgatctgaatatgagggtggataggaattttttgacagtgaaatctgttatgatgtagtctcatttccaagaaaagtcttgagttccatccccccttctgaatttaaattgaaacctggacagaaaacaaactatcctgtagtttccactgctcaggaggaaaaaaagaaatctatattatctaatgcatctttgccatctttattttctagaattctattagacttttcaattataggctattaggaaagaatataactcttagaattcccctaaatataattatcaactcatttgattaatatgcatattttttcccgtaagatttacaatacacgtgtgttttagtgaattaccaatggcttggagagaatgaaattggaataactaactgaaaaccctagatgtttgtagcattgagacccaatatctttttggaggccctctccatgttagcttattgtcaaattctggtgtgtaaacaaactccttgacccatgttaagttcagcatcctgcattttgttcatgaatcacattttaaaaggagaaaagctccacctggttttctttatttttttaaacagtgatttcaaagagaagataggcctttcataattgctaattatacatataggattaatagtcataaattatagtaaataaaacttgtacctattccttttataaatatgaattggctaggcacagtggctcacagctgtaatcccagcactttgggaggctgaggcgggcagatcacaaggtcaggtgtttgagactagcctggccaacatggcaaaaccctgtgtctactaaaaatacaaaaattagccaggcgtggtggcaggcacctgtaattccagctactcaggaagctggggcacgagaatcacttgaaccctggtggcagagtttgcagtgagctgagattgttccactgcattcctgggcactgcctgggtgacagaatgagactctgcctcaaaaaaaaaaaaagttattaaaaatagatatttaagattccaaaatgtagttgatccagtttgtttccctgtagcaagtagtgggatttgggtttcatgacatataattaaaatgttaatcacataactataatgccaacaattttctttatacatttttgtttaattatgttgacatatactttgtgttgtaccttatttcatgttactaaattttacataaagatgctggtctatttttatttaatcatatactgttatggtttgaatatagtttgttcctaccaaaactcatgttgaaattagattccccatgtgctagtgttgggaggcagagcctaatggaaggtgtttgggtcatgggggcagatagatcccacatgaataaactaatgccctcctactggggtgagtgagttctcattcttgctgtcgtgggaatggattagttctcacaagcaagggttactaaagagtctggctttcttgattttctcctttttgcctcctgccttcccatgtgatctctttgcacatacctactcccctttcactttgtaccaagagtggaagcaacatgagaccctcaccagatacagctgcccaatcttgagccttccagccaccagaatcatgagccaaataaaactctttttaaaaataagttacccagtcttagatattctattatagcgacacaaaatggactaagctgtactctgttgcattaaaatgtgttgtttatatgcaagtgacaaaaactcaaaatagtgtcagcatgaagggcagttcattggcttatatacagggaagtccaggcaatgactgggtcctgggtccaaacgtcaaaagcagtcatcttgccatcctacacacttggctctgattattttcttctttatggattggttttcttttcagattttccctttggggatattctgtatgggatgaggaacagtgaggtgagaggatggtggataacagcaattgacattttcagcttaccttagcataacaaggctgaaagcttttataaagcaagctatgtaaaattttggagaagtacttttattttgcccagattggatcacattccgttcctgagctaatcaagagaggaattcacccaaaggagggggaaatttttagaagaaagccagaatgtagggagcaggtgaggaaaggtagttactgggaatacgaaagtaacacattcattgcaccctgtttgaatttgagtagcaagaagtttctgatttgtactaacagaaggagtaaagttcagatttaatctgcaagtcttgattgtttttaactagagattttaatctcttcttcttattattgctgctttgagttgccattataggtttttggattttttttttaatgccatccatttttatttgacatcatgttgttgctagtttgagcagatgcacatagcatatgtttccattaccaatttggaaatttttcccagtggcatcagcatttgagagatactgattttgaaattagagtactaggggaaaatgcttcaaaaatgaagactacttaaataaaaattggctttaaataaacctttggggatctgtacttgactaaaaagtattttctttaaactttggtctttgaaaactaaagtgtgtgtgcatgtgttcattaaaatgacctataacatgaacattttccatactggagtgtgatgtactgtactcattttgaactttagaaccaaatgcatcctttagcatttgatgagctgctatataattctatttccagttttattttcttgccaaataaagtaccaaagctca

SEQ ID NO: 96 - DNA, 10923 bp, Homo Sapiens
atcgcacctggccatgaaggcttttagatgggtctggagcttggaggagaagtctgaactaaggataaactaaagagaggccaatgagacttgaaccctgagcctaagttgtcaccagcaggactgatgtgcacacagaaggaatgaagtatggatgtgaaagaacgcaggccttactgctccctgaccaagagcagacgagagaaggaacggcgctacacaaattcctccgcagacaatgaggagtgccgggtacccacacagaagtcctacagttccagcgagacattgaaagcttttgatcatgattcctcgcggctgctttacggcaacagagtgaaggatttggttcacagagaagcagacgagttcactagacaaggacagaattttaccctaaggcagttaggagtttgtgaaccagcaactcgaagaggactggcattttgtgcggaaatggggctccctcacagaggttactctatcagtgcagggtcagatgctgatactgaaaatgaagcagtgatgtccccagagcatgccatgagactttggggcaggggggtcaaatcaggccgcagctcctgcctgtcaagtcggtccaactcagccctcaccctgacagatacggagcacgaaaacaagtccgacagtgagaatgagcaacctgcaagcaatcaaggccagtctaccctgcagcccttgccgccttcccataagcagcactctgcacagcatcatccatccatcacttctctcaacagaaactccctgaccaatagaaggaaccagagtccggccccgccggctgctttgcccgccgagctgcaaaccacacccgagtccgtccagctgcaggacagctgggtccttggcagtaatgtaccactggaaagcaggcatttcctattcaaaacaggaacaggtacaacgccactgttcagtactgcaaccccaggatacacaatggcatctggctctgtttattcaccacctactcggccactacctagaaacaccctatcaagaagtgcttttaaattcaagaagtcttcaaagtactgtagctggaaatgcactgcactgtgtgccgtaggggtctcggtgctcctggcaatactcctgtcttattttatagcaatgcatctctttggcctcaactggcagctacagcagactgaaaatgacacatttgagaatggaaaagtgaattctgataccatgccaacaaacactgtgtcattaccttctggagacaatggaaaattaggtggatttacgcaagaaaataacaccatagattccggagaacttgatattggccgaagagcaattcaagagattcctcccgggatcttctggagatcacagctcttcattgatcagccacagtttcttaaattcaatatctctcttcagaaggatgcattgattggagtatatggccggaaaggcttaccgccttcccatactcagtatgacttcgtggagctcctggatggcagcaggctgattgccagagagcagcggagcctgcttgagacggagagagccgggcggcaggcgagatccgtcagccttcatgaggccggctttatccagtacttggattctggaatctggcatctggctttttataatgatgggaaaaatgcagagcaggtgtcttttaataccattgttatagagtctgtggtggaatgtccccgaaattgccatggaaatggagaatgcgtttctggaacttgccattgttttccaggatttctgggtccggattgttcaagagccgcctgtccagtgttatgtagtggcaacgggcagtactccaagggccgctgcctgtgtttcagcggctggaagggcaccgagtgtgatgtgccgactacccagtgtattgacccacagtgtgggggtcgtgggatttgtatcatgggctcttgtgcttgcaactcaggatacaaaggagaaagttgtgaagaagctgactgtatagaccctgggtgttctaatcatggtgtgtgtatccacggggaatgtcactgcagtccaggatggggaggtagcaattgtgaaatactgaagaccatgtgtccagaccagtgctccggccacggaacgtatcttcaagaaagtggctcctgcacgtgtgaccctaactggactggcccagactgctcaaacgaaatatgttctgtggactgtggctcacacggcgtttgcatgggggggacgtgtcgctgtgaagaaggctggacgggcccagcctgtaatcagagagcctgccacccccgctgtgccgagcacgggacctgcaaggatggcaagtgtgaatgcagccagggctggaatggagagcactgcactatcgagggttgtcctggtctgtgcaacagcaatggaagatgtaccctggaccaaaatggctggcattgtgtgtgccagcctggatggagaggagcaggctgtgacgtagccatggagactctttgcacagatagcaaggacaatgaaggagatggactcattgactgcatggatcccgattgctgcctacagagttcctgccagaatcagccctattgtcggggactgccggatcctcaggacatcattagccaaagccttcaatcgccttctcagcaagctgccaaatccttttatgatcgaatcagtttccttataggatctgatagcacccatgttatacctggagaaagtcctttcaataagagccttgcatctgtcatcagaggccaagtactgactgctgatggaactccacttattggagtaaatgtctcgtttttccattacccagaatatggatatactattacccgccaggacggaatgtttgacttggtggcaaatggtggggcctctctaactttggtatttgaacgatccccattcctcactcagtatcatactgtgtggattccatggaatgtcttttatgtgatggataccctagtcatgaagaaagaagagaatgacattcccagctgtgatctgagtggattcgtgaggccaaatcccatcattgtgtcatcacctttatccacctttttcagatcttctcctgaagacagtcccatcattcccgaaacacaggtactccacgaggaaactacaattccaggaacagatttgaaactctcctacttgagttccagagctgcagggtataagtcagttctcaagatcaccatgacccagtctattattccatttaatttaatgaaggttcatcttatggtagctgtagtaggaagactcttccaaaagtggtttcctgcctcaccaaacttggcctatactttcatatgggataaaacagatgcatataatcagaaagtctatggtctatctgaagctgttgtgtcagttggatatgagtatgagtcgtgtttggacctgactctgtgggaaaagaggactgccattctgcagggctatgaattggatgcgtccaacatgggtggctggacattagataaacatcacgtgctggatgtacagaacggtatactgtacaagggaaacggggaaaaccagttcatctcccagcagcctccagtcgtgagtagcatcatgggcaatgggcgaaggcgcagcatttcctgccccagttgcaatggtcaagctgatggtaacaagttactggccccagtggcgctagcttgtgggatcgatggcagtctgtacgtaggcgatttcaactatgtgcggcggatattcccttctggaaatgtaacaagtgtcttagaactaagcagcaacccagctcatagatactaccttgcaacggatccagtcacgggagatctgtacgtttctgacacaaacacccgcagaatttatcgcccaaagtcacttacgggggcaaaagacttgactaaaaatgcagaagtcgtcgcagggacaggggagcaatgccttccgtttgacgaggcgagatgtggggatggagggaaggccgtggaagccacactcatgagtcccaaaggaatggcagttgataagaatggattaatctactttgttgatggaaccatgattaggaaagttgaccaaaatggaatcatatcaactcttctgggctctaacgatttgacttcagccagacctttaacttgtgacaccagcatgcacatcagccaggtacgtctggaatggcccactgacctagccattaaccctatggataactccatttatgtcctggataataatgtagttttacagatcactgaaaatcgtcaagttcgcattgctgctggacggcccatgcactgtcaggttcccggagtggaatatcctgtggggaagcacgcggtgcagacaacactggaatcagccactgccattgctgtgtcctacagtggggtcctgtacattactgaaactgatgagaagaaaattaaccggataaggcaggtcacaacagatggagaaatctccttagtggccggaataccttcagagtgtgactgcaaaaatgatgccaactgtgactgttaccagagtggagatggctacgccaaggatgccaaactcagtgccccatcctccctggctgcttctccagatggtacactgtatattgcagatctagggaatatccggatccgggctgtgtcaaagaataagcctttacttaactctatgaacttctatgaagttgcgtctccaactgatcaagaactctacatctttgacatcaatggtactcaccaatatactgtaagtttagtcactggtgattacctttacaattttagctacagcaatgacaatgatattactgctgtgacagacagcaatggcaacacccttagaattagacgggacccaaatcgcatgccagttcgagtggtgtctcctgataaccaagtgatatggttgacaataggaacaaatggatgtttgaaaagcatgactgctcaaggactggaattagttttgtttacttaccatggcaatagtggccttttagccactaaaagtgatgaaactggatggacaacgttttttgactatgacagtgaaggtcgtctgacaaatgttacgtttccaactggagtggtcacaaacctgcatggggacatggacaaggctatcacagtggacattgagtcatctagccgagaagaagatgtcagcatcacttcaaatctgtcctcgatcgattctttctacaccatggttcaagatcagttaagaaacagctaccagattggttatgacggctccctcagaattatctacgccagtggcctggactcacactaccaaacagagccgcacgttctggctggcaccgctaatccgacggttgccaaaagaaacatgactttgcctggcgagaacggtcaaaacttggtggaatggagattccgaaaagagcaagcccaagggaaagtcaatgtctttggccgcaagctcagggttaatggcagaaacctcctttcagttgactttgatcgaacaacaaagacagaaaagatctatgacgaccaccgtaaatttctactgaggatcgcctacgacacgtctgggcacccgactctctggctgccaagcagcaagctgatggccgtcaatgtcacctattcatccacaggtcaaattgccagcatccagcgaggcaccactagcgagaaagtagattatgacggacaggggaggatcgtgtctcgggtctttgctgatggtaaaacatggagttacacatatttagaaaagtccatggttcttctgcttcatagccagcggcagtacatcttcgaatacgatatgtgggaccgcctgtctgccatcaccatgcccagtgtggctcgccacaccatgcagaccatccgatccattggctactaccgcaacatatacaaccccccggaaagcaacgcctccatcatcacggactacaacgaggaagggctgcttctacaaacagctttcttgggtacaagtcggagggtcttattcaaatacagaaggcagactaggctctcagaaattttatatgatagcacaagagtcagttttacctatgatgaaacagcaggagtcctaaagacagtaaacctccagagtgatggttttatttgcaccattagatacaggcaaattggtcccctgattgacaggcagattttccgctttagtgaagatgggatggtaaatgcaagatttgactatagctatgacaacagctttcgagtgaccagcatgcagggtgtgatcaatgaaacgccactgcctattgatctgtatcagtttgatgacatttctggcaaagttgagcagtttggaaagtttggagttatatattatgatattaaccagatcatttctacagctgtaatgacctatacgaagcactttgatgctcatggccgtatcaaggagattcaatatgagatattcaggtcgctcatgtactggattacaattcagtatgataacatgggtcgggtaaccaagagagagattaaaatagggccctttgccaacaccaccaaatatgcttatgaatatgatgttgatggacagctccaaacagtttacctcaatgaaaagataatgtggcggtacaactacgatctgaatggaaacctccatttactgaacccaagtaacagtgcgcgtctgacaccccttcgctatgacctgcgagacagaatcactcgactgggtgatgttcaatatcggttggatgaagatggtttcctacgtcaaaggggcacggaaatctttgaatatagctccaaggggcttctaactcgagtttacagtaaaggcagtggctggacagtgatctaccgttatgacggcctgggaaggcgtgtttctagcaaaaccagtctaggacagcacctgcagtttttttatgctgacttaacttatcccactaggattactcatgtctacaaccattcgagttcagaaattacctccctgtattatgatctccaaggacatctttttgccatggaaatcagcagtggggatgaattctatattgcatcggataacacagggacaccactggctgtgttcagtagcaatgggcttatgctgaaacagattcagtacactgcatatggggaaatctattttgactctaatattgactttcaactggtaattggatttcatggtggcctgtatgacccactcaccaaattaatccactttggagaaagagattatgacattttggcaggacggtggacaacacctgacatagaaatctggaaaagaattgggaaggacccagctccttttaacttgtacatgtttaggaataacaaccctgcaagcaaaatccatgacgtgaaagattacatcacagatgttaacagctggctggtgacatttggtttccatctgcacaatgctattcctggattccctgttcccaaatttgatttaacagaaccttcttacgaacttgtgaagagtcagcagtgggatgatataccgcccatcttcggagtccagcagcaagtggcgcggcaggccaaggccttcctgtcgctggggaagatggccgaggtgcaggtgagccggcgccgggccggcggcgcgcagtcctggctgtggttcgccacggtcaagtcgctgatcggcaagggcgtcatgctggccgtcagccagggccgcgtgcagaccaacgtgctcaacatcgccaacgaggactgcatcaaggtggcggccgtgctcaacaacgccttctacctggagaacctgcacttcaccatcgagggcaaggacacgcactacttcatcaagaccaccacgcccgagagcgacctgggcacgctgcggttgaccagcggccgcaaggcgctggagaacggcatcaacgtgacggtgtcgcagtccaccacggtggtgaacggcaggacgcgcaggttcgcggacgtggagatgcagttcggcgcgctggcgctgcacgtgcgctacggcatgaccctggacgaggagaaggcgcgcatcctggagcaggcgcggcagcgcgcgctcgcccgggcctgggcgcgcgagcagcagcgcgtgcgcgacggcgaggagggcgcgcgcctctggacggagggcgagaagcggcagctgctgagcgccggcaaggtgcagggctacgacgggtactacgtactctcggtggagcagtaccccgagctggccgacagcgccaacaacatccagttcctgcggcagagcgagatcggcaggaggtaacgcccgggccgcgcccgccgagccgctcacgccctgcccacattgtcctgtggcacaacccgagtgggactctccaacgcccaagagccttcctcccgggggaatgagactgctgttacgacccacacccacaccgcgaaaacaaggaccgcttttttccgaatgaccttaaaggtgatcggctttaacgaatatgtttacatatgcatagcgctgcactcagtcggactgaacgtagccagaggaaaaaaaaatcatcaaggacaaaggcctcgacctgttgcgctgggccgtctgttccttctaggcactgtatttaactaactttaaaaaagaaaaaaaaatgtgtacagtgtttccaaatagtcccgaattgtcgacctttgcttacaagaagtagtctgtctgcataggatgtgatagctatctctgttcattttacaatgtggggcaaagttactgtttctagacaacccaactgctttccctgtgcagctttgtagaaggacattggcacagtgacttctgcggcggggatttattaatggattttacaatgctaacgtggtttcccttcggggaaaaaactggcaactagaatccttgtcactgataagcaaaggaaatcctgatttttttgtaaattatgtgagacaagttgtttatggatttttatatgaattacaatttactgtacatcaaatcttagtctcagaggagttaatttatgtaaagtgtttaaaaatttatacttaaaaataaaatgataaaaacgtgaactgtgtgatttttttaaaaggattgcaccttttgttatctgttatagctgtacagtatgaattattatattgtagagatataacaacttatgcctataatgtccagaagtgttaatatttttgtattaggttgaaaaaatgtgcaagcttctatcactagatggataggaccgtgcaattctaggtgggtggcgaatcagagagctcctttctcttccctctctcacgcatcaggccagtgtcctcagcattgtcaactgagaggcacagtagacaactagggctggtggaatgtaagggaagaagattgaaaaaacgggaggaagggttctctggccctctctcaaccttgcaagtcaatggggagttgttgatataattaaccccgaggtttttactgttactgttccaaagctctgtctcttgatggaggagagaccacatcagatgctggggaaataggaggaggaaaggttctgatgtagtcgtgatcctaaacacgtgtcttaagatctaggaaagacagcagaaaccgagcagtggtgggtgagccagatggagccggtcagggttactctaagcccacatgaccaaaccatcttggggggctggtttgaatgacagcctctgctctgtctcggggaagccgggggtggcagatccagctggaagtgaactgacagccgcgccctcctgcacacatgcatgcacgcgtgtgggaacgagcccagccgccatctgcacttccgtgtcggctcagctctgacaaatctctttcctgagcactaaattcagccacgaaaatatttttagaagatatttctcagttcatcgagctatagtacacactgttttcctctatgtataatggtgataaaatatagcaagtgaacatgtcgtaaatataaaggttcaagtgatgtattgaaaataattttctaactgctttgtatgtatcacatactctaaattgcacagtaggcgtgtttattaaacagatgattggctgggaaagtttcaaaatagctactgaatttacagtatcagtgctattactgtctttgtgtatttggtagagcataccgaagtaattaatcttctaatgaatgctgatgatattttattagaatgaaagcacagattagcattaatattttttattctggaaatcctttggcaagtattatgaagcccaaatttagaaaactatgagatttcaaaccacataaacatgattctgttttccattttattttttaactgttaggtatttgcagttctgttccgtggaacttctgcaggcctgtatttagcatgctgtaagtacttttgggtgaaataggctctgagtctaaattctcagacatgtttctgatgtattaccatgaaaagcttgtgccacatgacagaagtgagatcatagtcttaacctcttcttgacgtggactggtcttcactcgggcaccgataaataacagatttggagtatctcctggtgcttattttagatgatgaagtcaaatcaacccaattagtgtcctgttagtaggtataatgagcctatttctttctaaaaagacttgtgatctggacatgcttttacaagaaatagtgaccttggggaatatgtaaacaaaagacctttttctaagagttgggagggggtgggggactgtataatgaaaagaattagcttacaaaaaagaaattgatattcaaagtattttaggcaaagccagtcaaaatgctttcatgatattttgagatgtaaattttgtctgatttgtattgttcttttcatttgccttcttaactttatatgtgacctgaattttccataacttgatgactatagattgcacctaggcattccaataaaagccaacccaatgtg

SEQ ID NO: 97 - DNA, 3859 bp, Homo Sapiens
agacagcagcgactttaggctggataatagtcaaattcttacctcgctctttcactgctagtaagatcagattgcgtttctttcagttactcttcaatcgccagtttcttgatctgcttctaaaagaagaagtagagaagataaatcctgtcttcaatacctggaaggaaaaacaaaataacctcaactccgttttgaaaaaaacattccaagaactttcatcagagattttacttagatgatttacacaatgaagaaagtacatgcactttgggcttctgtatgcctgctgcttaatcttgcccctgcccctcttaatgctgattctgaggaagatgaagaacacacaattatcacagatacggagttgccaccactgaaacttatgcattcattttgtgcattcaaggcggatgatggcccatgtaaagcaatcatgaaaagatttttcttcaatattttcactcgacagtgcgaagaatttatatatgggggatgtgaaggaaatcagaatcgatttgaaagtctggaagagtgcaaaaaaatgtgtacaagagataatgcaaacaggattataaagacaacattgcaacaagaaaagccagatttctgctttttggaagaagatcctggaatatgtcgaggttatattaccaggtatttttataacaatcagacaaaacagtgtgaacgtttcaagtatggtggatgcctgggcaatatgaacaattttgagacactggaagaatgcaagaacatttgtgaagatggtccgaatggtttccaggtggataattatggaacccagctcaatgctgtgaataactccctgactccgcaatcaaccaaggttcccagcctttttgaatttcacggtccctcatggtgtctcactccagcagacagaggattgtgtcgtgccaatgagaacagattctactacaattcagtcattgggaaatgccgcccatttaagtacagtggatgtgggggaaatgaaaacaattttacttccaaacaagaatgtctgagggcatgtaaaaaaggtttcatccaaagaatatcaaaaggaggcctaattaaaaccaaaagaaaaagaaagaagcagagagtgaaaatagcatatgaagaaatttttgttaaaaatatgtgaatttgttatagcaatgtaacattaattctactaaatattttatatgaaatgtttcactatgattttctatttttcttctaaaatgcttttaattaatatgttcattaaattttctatgcttattgtacttgttatcaacacgtttgtatcagagttgcttttctaatcttgttaaattgcttattctaggtctgtaatttattaactggctactgggaaattacttattttctggatctatctgtattttcatttaactacaaattatcatactaccggctacatcaaatcagtcctttgattccatttggtgaccatctgtttgagaatatgatcatgtaaatgattatctcctttatagcctgtaaccagattaaggaatacagctcttaaaaaatcaagaacttcctgagtttcacatataaaatggtgacaaacacctgcttctgataaagtttatccaattttgtatttatagtattctattgtaataatagaattctattatgtgcttccctccttagacatagtttttctccttttgtactaaccagtacttccatctatattgagctaaactgtctttgaacagtcaactctgcatcatgtgcctgcctgatttggattggtttcacttttttttttgtttgaccatagcccattctatcagtcaagatgactgaataattgtgtgttaaatacaactcatgataaggagaacctttatggaaacaagaagttttatggcaatcgagagggaattatttatatgtacttcttaatactatgcttcccaatattttttcttactaaaaataacaaaaatatttaaaccttctgaaatctattcagttatcattaggatttgcacacaatgcaactaataattcatgctttaaaaagtaggttatttctgttgaagagaaaattatcagcagggaagagtctactagaaaattcatgtgctagtcattcttggggatttaatattttgctggagttaattcactatatccagacctgtatctttcatttattgctgagccatgtgcagtctggcatctcaacaacctcaacaacctcaacaacctccaagacatgtcagtttctgtagtgttcacctcaaatctgacactggaattggaactgatttagaaacaaccatttcattcatttggtatgactagcttcatgactagcttcatgaatagcttcatgaatagcttcatgacttctcgctaacaatgatagtataattctgcctgttcttcaggattgaaattttgaactcaatttagatttcctgttttccctcatataccacatctaaacagtctccaaatctttatgcttttttttttttttttcgaaaaagttcacccaatccctaggctttttacttttttctttttcttttcttttttcttgtttttttttttttttcattttgttttgttttgttatgtttttttagacagggtcccactctgtcacccaggctggagtgcagtggtgcaatcacaggacactgaaacctcccacctagctgggactagaggtgcaggccaccacaccagctaatttatgtaatttttgtagagacgagtttcaccacgttacctaggcttgtcttgaacacctgggctcaagcaatcttccagccccagcctcccaaagtgctgggattacaggtataaaccacaatgcccccgtttttactctttactgcatccttcccatcagtattaattcctcagaaatttagtacattcctccaccatttcaaaatgctcccagaactcacactagttggtacttaactacaaccttcaacctcaccatttaattttgatgtatgtttttggatttaccaacagtactttctttcatgactactttgatttagttaagaatgctcactgtacactgaatgttaattactcagctaattcacactgatttcctgtttaaaaatatgatcccctccaggccattcatgtgaagtcagggtacagctgatgccagctacagaatcactatgtttcaatatggaatatgaaaagtcctaacacataattgcaaatcattttctactatggtatacaaattttatcattacaaaatagtatcagcttttttcacttaaggaaaataatacatcttcattcaaatattcagtgcataaataattgccttaaattgagtctttgctgtggaatttgagagttttggaaatcaaaggcccttgtgaaacatttcctgttgccatttatttatagatagcaatagcttcaaatgagtgggaaagtctacttaggtgaagtggtaaatagtcactaagattgtataaatagcgcattgatgagttgcctaattgttttctccaacaataaccactggtccattggttcactacttactcaagaaagacatatactgagatggcttgaaatgtttaatgcatgtgaacgttatttttaccgtgttttggaaaaagatcttgatgttattgtcttcctttattttccacaattaagtgcatctaactgtgaattgtatatggaattacattattcagcatatacatatatttacctgctttgttcattctctgtattcaaaattaacagatcatgctgaaaaccactcaaacgattatattttttacattataagaagtaaaatatattattctgaataatgaaa

SEQ ID NO: 98 - DNA, 6015 bp, Homo Sapiens
gccgagtcctaggccaggtctggggtaacctggaacttccacctgggctctgcgctaggtctctgtttcactccctccccgcggggcgcgcagctcgcgggtctttggacaccaccggtcctgagtccgcggactgccattttcattaagaactgccacttagaggtaccaaaataaagggtatttgctacctttaatacttgccagttcaggttggaggcacaggcagcagcaagaatggaaagaaatgttcttacaacattttcacaggaaatgtcccagttaattttgaatgaaatgccaaaagctgaatattccagtttattcaatgattttgttgaatctgaattttttttgattgatggggattcattacttatcacatgtatctgtgagatatcatttaagcctgggcagaacctccatttcttctatctggttgaacgctatcttgtggatcttattagcaaaggaggacaattcaccatagttttcttcaaggatgccgagtatgcgtatttcaacttccctgaacttctttctttgagaactgctttaattcttcatcttcagaagaataccaccattgatgttcgaacaacattttcgagatgcttatcaaaagagtggggaagtttcttggaagagagttacccatatttcctgatagttgcagacgaaggcctgaacgatctacaaacacagcttttcaactttttaatcattcattcttgggcaaggaaggtcaacgttgtactttcctcagggcaagaatctgatgttctttgcctttatgcataccttcttccaagcatgtacagacaccagattttttcctggaagaataagcagaacattaaagatgcttatacaaccctgcttaaccagttggaaagatttaagctttcagcattagcacctctttttggaagtttaaaatggaataatattacggaagaggcacacaagactgtatctctgcttacacaagtctggccagaaggatctgacattcggcgtgtcttttgtgttacttcatgctcattatctttgagaatgtaccatcgctttttaggaaacagagagccctcctctggtcaggaaactgagatccaacaggtgaacagtaattgcttaaccctgcaggagatggaagatttgtgtaaactgcattgtctcactgtggtttttctactccatctgcctctttctcaaagagcttgtgctagagtcatcacttcccattgggctgaggacatgaagcctttattacaaatgaaaaagtggtgtgaatatttcatcttaagaaatatacatacttttgaattttggaatctgaatttaattcacctttctgacttaaatgatgagcttttgttgaagaatattgctttttactatgaaaatgaaaatgtaaaaggcctacatttgaatttgggagataccattatgaaagattatgaatatctctggaataccgtatcaaagttggtcagagactttgaggttggacagccatttcctctgagaacaacaaaagtttgttttcttgaaaagaaaccatcaccaatcaaagacagctccaatgaaatggtgcccaatttgggttttattccaacgtcatcttttgtggttgataaatttgctggagatattttgaaagatttgccttttctaaagagtgatgatcctattgttacttcactggttaaacaaaaggaatttgatgaacttgtgcactggcattctcataaacccctgagtgatgattatgacaggtccaggtgtcagtttgatgaaaaatctagagaccctcgtgttcttagatctgtgcaaaagtatcatgttttccaacggttttatgggaattcattagaaacagtctcttcgaaaatcatcgtgactcaaactattaagtcaaagaaggattttagtgggcccaagagcaaaaaggcacacgagaccaaggctgaaataattgctagagagaataagaaaaggttatttgccagggaagaacaaaaggaagagcaaaagtggaatgctttgtcattttctattgaagagcaattgaaagaaaatttacactctggaataaagagcctggaagattttttgaaatcctgtaaaagtagctgtgtgaaacttcaggttgaaatggtggggttaactgcttgcttgaaagcctggaaagaacattgccgaagtgaagaaggtaaaaccacgaaagatttaagtatagctgttcaggtgatgaaaaggatccactccttgatggaaaaatactcagaacttttacaagaagatgatcggcaactcatagccagatgccttaagtatttaggatttgatgagttggcaagttctttacatccagcccaggatgcagaaaatgatgtaaaagtgaagaaaaggaataaatattcagttggcattgggccagctcggttccaactgcaatacatgggccattatttgatacgagatgagagaaaagacccagatcccagggtccaggattttattcccgacacatggcagcgagagctccttgatgttgtggataagaatgagtcagcagtgattgttgccccaacgtcctcaggcaaaacctatgcctcctactactgtatggagaaagtgctgaaggagagcgacgacggggtggtcgtgtacgttgcacccacaaaggcccttgttaatcaagtggcagcaactgttcagaatcgttttacgaaaaatctgccaagtggtgaagttctctgtggtgttttcaccagggagtatcgtcatgatgccttaaactgtcaggtacttattacagtgcctgcctgctttgaaattctgctgcttgctcctcatcgccaaaactgggtgaaaaagatcagatatgttatatttgatgaggttcattgtcttggtggagaaattggagcagaaatctgggaacatctccttgtcatgatccgatgtccctttttggctctttcagctaccataagtaatcctgaacatctcaccgagtggctacaatcggtaaaatggtactggaaacaagaagacaaaataattgaaaataataccgcttctaaaagacatgtgggtcgtcaggccggctttcccaaagactacttgcaagtaaaacaatcgtataaagttagacttgtgctctatggagagaggtataatgatctagagaagcatgtatgttcaataaaacatggtgacattcattttgatcattttcacccatgtgctgcactaacaacagatcatattgaaaggtatggattccctcctgatcttaccctttcacctcgagaaagcatccagctgtatgatgccatgtttcaaatttggaaaagttggcctcgggcccaggaactgtgcccagaaaacttcattcattttaacaataaattagtcattaaaaagatggatgctaggaaatatgaagagagtctaaaggcagaattaacaagttggattaaaaatggcaacgtagagcaggccagaatggtacttcagaatcttagtcctgaagcagatttgagtccagaaaacatgatcaccatgtttccacttctagttgaaaaactaaggaaaatggagaagttacctgcactattttttttattcaagttaggagctgtagaaaacgcagctgaaagtgtgagcactttcctaaagaaaaagcaggagacaaaaaggcctcccaaagctgataaagaagcccatgtcatggctaacaaacttcgaaaagttaaaaaatccatagagaaacaaaagatcatagatgaaaagagccagaaaaaaaccagaaatgtggatcaaagcctaatacatgaagctgaacatgataatctagtgaagtgtctagagaagaacctggaaatcccacaggactgcacatatgctgatcaaaaagcagtggacactgagactttgcagaaggtatttggtcgagtaaaatttgaaagaaaaggtgaagaattgaaagccttggcagaaaggggtattggatatcatcacagtgctatgagtttcaaagaaaaacaattagttgaaatcctctttagaaaaggatatcttagggtggtgacagctactggaacacttgctttaggtgtcaacatgccttgtaaatctgtggtttttgctcaaaactcagtctatctggatgcgttgaattatagacagatgtctggccgtgctggaagaagaggtcaagacctgatgggagatgtatatttctttgatattccattccccaaaataggaaaactcataaaatccaatgttcctgagctgagaggacacttccctctcagcataaccctggtcctgcgactcatgctgctggcttccaagggagatgacccagaggatgccaaggcaaaggtgctatcagtgctaaagcattcattgctgtccttcaagcaacccagagtcatggacatgttaaaactttacttcctgttttctttgcagttcctggtgaaagagggctatttagatcaagaaggtaatcctatggggtttgctggacttgtatcacatttgcattatcatgaaccttctaatcttgtttttgtcagttttcttgtaaatggactcttccatgatctctgtcagccaaccaggaaaggctcaaaacatttttctcaagacgttatggaaaagctagtattagtattggcacatctctttggaagaagatattttccaccaaagttccaagatgcacacttcgagttttatcaatcaaaggtgttccttgatgatctccctgaggattttagtgatgctttagatgaatataacatgaaaattatggaggactttaccactttcctacgaattgtttccaaactggctgatatgaatcaggaatatcaactcccattgtcaaaaatcaaattcacaggtaaagaatgtgaagactctcaactcgtatctcatttgatgagctgcaaggaaggaagagtagcaatttcaccatttgtttgtctgtctgggaactttgatgatgatttgcttcgactagaaactccaaaccatgttactctaggcacaatcggtgtcaatcgctctcaggctccagtgctgttgtcacagaaatttgataaccgaggaaggaaaatgtcgcttaatgcctatgcactggatttctacaaacatggttccttgataggattagtccaggataacaggatgaatgaaggagatgcttattatttgttgaaggattttgcactcaccattaaatctatcagtgtttccttgcgtgagctatgtgaaaatgaagacgacaacgttgtcttagcctttgaacaactgagtacaactttttgggaaaagttaaacaaagtctaaaaacaaagtctatgcaaaccacttaaaaataattccatagtagtttttcaggtcacgtttttgattcttatgcttcttgccagaaatacattatgataaagtggaaatacattacgatgaagtggaaagagcaaacactttggaatcaaacagagttgcaatcaaacctgccatgttctgtcatgaatactcacaaattatttagtatacctgaatcttggtttctttttataactgagtaataatggttacatctcaggtagtttgaggattgactaaaaaaatgcgagaatgttgtatgtgactgaataacaatttttactctgcgaagccaaagtaaatataatattatcagtaactttatccccagtgtcagtatttataaaatgtttattaaggctagaaaaaatgaatacaatatcctgaaggtgaaatatattctcttcaattagcataaatatgatttacataagttagctatacagctattgagatagtactttctagtaaacttaaactactttttaaacatacattttgtgatgatttaacaaaaatatagagaatgatttgctttattgtaattgtatataagtgactggaaaagcacaaagaaataaagtgggttcgatctgttta

SEQ ID NO: 99 - DNA, 1576 bp, Homo Sapiens
actactccagacagacggctttggaatccaccagctacatccagctccctgaggcagagttgagaatggagagaatgttacctctcctggctctggggctcttggcggctgggttctgccctgctgtcctctgccaccctaacagcccacttgacgaggagaatctgacccaggagaaccaagaccgagggacacacgtggacctcggattagcctccgccaacgtggacttcgctttcagcctgtacaagcagttagtcctgaaggcccctgataagaatgtcatcttctccccactgagcatctccaccgccttggccttcctgtctctgggggcccataataccaccctgacagagattctcaaaggcctcaagttcaacctcacggagacttctgaggcagaaattcaccagagcttccagcacctcctgcgcaccctcaatcagtccagcgatgagctgcagctgagtatgggaaatgccatgtttgtcaaagagcaactcagtctgctggacaggttcacggaggatgccaagaggctgtatggctccgaggcctttgccactgactttcaggactcagctgcagctaagaagctcatcaacgactacgtgaagaatggaactagggggaaaatcacagatctgatcaaggaccttgactcgcagacaatgatggtcctggtgaattacatcttctttaaagccaaatgggagatgccctttgacccccaagatactcatcagtcaaggttctacttgagcaagaaaaagtgggtaatggtgcccatgatgagtttgcatcacctgactataccttacttccgggacgaggagctgtcctgcaccgtggtggagctgaagtacacaggcaatgccagcgcactcttcatcctccctgatcaagacaagatggaggaagtggaagccatgctgctcccagagaccctgaagcggtggagagactctctggagttcagagagataggtgagctctacctgccaaagttttccatctcgagggactataacctgaacgacatacttctccagctgggcattgaggaagccttcaccagcaaggctgacctgtcagggatcacaggggccaggaacctagcagtctcccaggtggtccataaggctgtgcttgatgtatttgaggagggcacagaagcatctgctgccacagcagtcaaaatcaccctcctttctgcattagtggagacaaggaccattgtgcgtttcaacaggcccttcctgatgatcattgtccctacagacacccagaacatcttcttcatgagcaaagtcaccaatcccaagcaagcctagagcttgccatcaagcagtggggctctcagtaaggaacttggaatgcaagctggatgcctgggtctctgggcacagcctggcccctgtgcaccgagtggccatggcatgtgtggccctgtctgcttatccttggaaggtgacagcgattccctgtgtagctctcacatgcacaggggcccatggactcttcagtctggagggtcctgggcctcctgacagcaataaataatttcgttgga

SEQ ID NO: 100 - DNA, 1538 bp, Homo Sapiens
gccgggcagtggctcgtgggagccaagatggcggcggcggcggcagcgacagcagcagcagcagccagtattcgggaaaggcagacaggtactcatttatgacagatttggccaagatataatctctcctctgctatctgtgaaggagctaagagacatgggaatcactctgcatctgcttttacactctgatcgagatcctattccagatgttcctgcagtatactttgtaatgccaactgaagaaaatattgacagaatgtgccaggatcttcgaaatcaactatatgaatcatattatttaaattttatttctgctatttcaagaagtaaactggaagatattgcaaatgcagcgttagcagctagtgcagtaacacaagtagccaaggtttttgaccaatatctcaattttattactttggaagatgatatgtttgtattatgtaatcaaaataaggagcttgtttcatatcgtgccattaacaggccagatatcacagacacggaaatggaaactgttatggacactatagttgacagcctcttctgcttttttgttactctgggtgctgttcctataatcagatgttcaagaggaacagcagcagaaatggtagcagtgaaactagacaagaaacttcgagaaaatctaagagatgcaagaaacagtctttttacaggtgatacacttggagctggccaattcagcttccagaggcccttattagtccttgttgacagaaacatagatttggcaactcctttacatcatacttggacatatcaagcattggtgcacgatgtactggatttccatttaaacagggttaatttggaagaatcttcaggagtggaaaactctccagctggtgctagaccaaagagaaaaaacaagaagtcttatgatttaactccggttgataaattttggcaaaaacataaaggaagtccattcccagaagttgcagaatcagttcagcaagaactagaatcttacagagcacaggaagatgaggtcaaacgacttaaaagcattatgggactagaaggggaagatgaaggagccataagtatgctttctgacaataccgctaagctaacatcagctgttagttctttgccagaactccttgagaaaaaaagacttattgatctccatacaaatgttgccactgctgttttagaacatataaaggcaagaaaattggatgtatattttgaatatgaagaaaaaataatgagcaaaactactctggataaatctcttctagatataatatcagaccctgatgcaggaactccagaagataaaatgaggttgtttcttatctattatataagcacacagcaagcaccttctgagttgtcacaacttggacaaaagtaacacagaagaaccttactatgataatctacttggaatgtggataaatgtaaaaagaagaaaagttagaagagcaatatgtttccttctctgtaacagtgtcctaacagtgaaaatcagagttatttgttaatttttaaggaaattatat

SEQ ID NO: 101 - DNA, 2979 bp, Homo Sapiens
ttcctagtcccgggcaggccggctcggaggcagcgagaaagcgcagccaggcggctgctcggcgttctctcaggtgactgctcggagttctcccagtgtttggtgttgcaagcaggatccaaaggagacctatagtgactcccaggagctcttagtgaccaagtgaaggttgaagcactggacaatgccacatactttgtggatggtgtgggtcttgggggtcatcatcagcctctccaaggaagaatcctccaatcaggcttctctgtcttgtgaccgcaatggtatctgcaagggcagctcaggatctttaaactccattccctcagggctcacagaagctgtaaaaagccttgacctgtccaacaacaggatcacctacattagcaacagtgacctacagaggtgtgtgaacctccaggctctggtgctgacatccaatggaattaacacaatagaggaagattctttttcttccctgggcagtcttgaacatttagacttatcctataattacttatctaatttatcgtcttcctggttcaagcccctttcttctttaacattcttaaacttactgggaaatccttacaaaaccctaggggaaacatctcttttttctcatctcacaaaattgcaaatcctgagagtgggaaatatggacaccttcactaagattcaaagaaaagattttgctggacttaccttccttgaggaacttgagattgatgcttcagatctacagagctatgagccaaaaagtttgaagtcaattcagaatgtaagtcatctgatccttcatatgaagcagcatattttactgctggagatttttgtagatgttacaagttccgtggaatgtttggaactgcgagatactgatttggacactttccatttttcagaactatccactggtgaaacaaattcattgattaaaaagtttacatttagaaatgtgaaaatcaccgatgaaagtttgtttcaggttatgaaacttttgaatcagatttctggattgttagaattagagtttgatgactgtacccttaatggagttggtaattttagagcatctgataatgacagagttatagatccaggtaaagtggaaacgttaacaatccggaggctgcatattccaaggttttacttattttatgatctgagcactttatattcacttacagaaagagttaaaagaatcacagtagaaaacagtaaagtttttctggttccttgtttactttcacaacatttaaaatcattagaatacttggatctcagtgaaaatttgatggttgaagaatacttgaaaaattcagcctgtgaggatgcctggccctctctacaaactttaattttaaggcaaaatcatttggcatcattggaaaaaaccggagagactttgctcactctgaaaaacttgactaacattgatatcagtaagaatagttttcattctatgcctgaaacttgtcagtggccagaaaagatgaaatatttgaacttatccagcacacgaatacacagtgtaacaggctgcattcccaagacactggaaattttagatgttagcaacaacaatctcaatttattttctttgaatttgccgcaactcaaagaactttatatttccagaaataagttgatgactctaccagatgcctccctcttacccatgttactagtattgaaaatcagtaggaatgcaataactacgttttctaaggagcaacttgactcatttcacacactgaagactttggaagctggtggcaataacttcatttgctcctgtgaattcctctccttcactcaggagcagcaagcactggccaaagtcttgattgattggccagcaaattacctgtgtgactctccatcccatgtgcgtggccagcaggttcaggatgtccgcctctcggtgtcggaatgtcacaggacagcactggtgtctggcatgtgctgtgctctgttcctgctgatcctgctcacgggggtcctgtgccaccgtttccatggcctgtggtatatgaaaatgatgtgggcctggctccaggccaaaaggaagcccaggaaagctcccagcaggaacatctgctatgatgcatttgtttcttacagtgagcgggatgcctactgggtggagaaccttatggtccaggagctggagaacttcaatccccccttcaagttgtgtcttcataagcgggacttcattcctggcaagtggatcattgacaatatcattgactccattgaaaagagccacaaaactgtctttgtgctttctgaaaactttgtgaagagtgagtggtgcaagtatgaactggacttctcccatttccgtctttttgatgagaacaatgatgctgccattctcattcttctggagcccattgagaaaaaagccattccccagcgcttctgcaagctgcggaagataatgaacaccaagacctacctggagtggcccatggacgaggctcagcgggaaggattttgggtaaatctgagagctgcgataaagtcctaggttcccatatttaagaccagtctttgtctagttgggatctttatgtcactagttatagttaagttcattcagacataattatataaaaactacgtggatgtaccgtcatttgaggacttgcttactaaaactacaaaacttcaaattttgtctggggtgctgttttataaacatatgccagatttaaaaattggtttttggtttttcttttttctatgagataaccatgatcataagtctattactgatatctgaatatagtcccttggtatccaagggaattggttgcaggatcctcgtggatatcaaaattcatagatgatcaagtcccttataagagtggcatagtatttgcatataacctgtgtacattctcctgtatactttaaatcatctctagattacttatgatacccaatacaatgtaaatactatgtaaa

SEQ ID NO: 102 - DNA, 1237 bp, Homo Sapiens
agtttcagtcacacaagaagggaggagagaaaagccatggccgacaaggtcctgaaggagaagagaaagctgtttatccgttccatgggtgaaggtacaataaatggcttactggatgaattattacagacaagggtgctgaacaaggaagagatggagaaagtaaaacgtgaaaatgctacagttatggataagacccgagctttgattgactccgttattccgaaaggggcacaggcatgccaaatttgcatcacatacatttgtgaagaagacagttacctggcagggacgctgggactctcagcagctcctcaggcagtgcaggacaacccagctatgcccacatcctcaggctcagaagggaatgtcaagctttgctccctagaagaagctcaaaggatatggaaacaaaagtcggcagagatttatccaataatggacaagtcaagccgcacacgtcttgctctcattatctgcaatgaagaatttgacagtattcctagaagaactggagctgaggttgacatcacaggcatgacaatgctgctacaaaatctggggtacagcgtagatgtgaaaaaaaatctcactgcttcggacatgactacagagctggaggcatttgcacaccgcccagagcacaagacctctgacagcacgttcctggtgttcatgtctcatggtattcgggaaggcatttgtgggaagaaacactctgagcaagtcccagatatactacaactcaatgcaatctttaacatgttgaataccaagaactgcccaagtttgaaggacaaaccgaaggtgatcatcatccaggcctgccgtggtgacagccctggtgtggtgtggtttaaagattcagtaggagtttctggaaacctatctttaccaactacagaagagtttgaggatgatgctattaagaaagcccacatagagaaggattttatcgctttctgctcttccacaccagataatgtttcttggagacatcccacaatgggctctgtttttattggaagactcattgaacatatgcaagaatatgcctgttcctgtgatgtggaggaaattttccgcaaggttcgattttcatttgagcagccagatggtagagcgcagatgcccaccactgaaagagtgactttgacaagatgtttctacctcttcccaggacattaaaataaggaaactgtatgaatgtctgtgggcaggtacatgtgtatggtcg

SEQ ID NO: 103 - DNA, 1291 bp, Homo Sapiens
tggcaaaccatggtgggccccagctgtgggtagaaagatggggcacccaccagtctctcccagtgccccggccccagctggcaccacagctatacctgggcttattccagaccttgtcgccgggaccccctggccccgctgggctctcattgccggcgcccttgccgcgggcgtcctcctcgtctcctgcctcctctgtgctgcctgctgctgctgccgccgccacaggaagaagcccagggacaaggagtccgtgggtctgggcagtgcccgcggcaccaccaccacccacctggtgcaacctgatgtggatggcctggagtccagcccgggggatgctcagcaatgggggtgcctgcagctctccctggagttcgactttggaagccaggagatcagggtgggcctgaggcaggcagccgacctgaggcctgggggcaccgtggacccctatgcccgggtcagcgtctccacccaggccggacacagacatgagacaaaagtgcaccgaggcacgctctgccccgtgtttgacgagacctgctgcttccacatcccgcaggcggagctgccaggggccaccctgcaggtgcagcttttcaacttcaagcgcttctcggggcatgagcccctgggtgagctccgtctgccactgggcaccgtggatctgcagcatgttctggagcactggtacctgctgggcccgccggctgccactcagcccgagcaggtcggggagctgtgcttctctctccggtacgtgcccagctcaggccggctgaccgtggtggtgctggaggctcgaggcctgcgtccaggacttgcagagccctacgtgaaggtccagctcatgctgaaccagaggaagtggaagaagagaaagacagccaccaaaaagggcacggcggccccctacttcaatgaggccttcaccttcctggtgcccttcagccaggtccagaatgtggacctggtgctggctgtctgggaccgcagcctgccgctccgaactgagcccgtaggcaaggtgcacctgggtgcccgggcctcggggcagcccctgcagcactgggcagacatgctggcccacgcccggcggcccattgcccagcggcaccccctgcggccagccagggaggtggaccgcatgctggccctgcagccccgccttcgcctgcgcctgcccttgccccactcctgaatgcaccacatgcctctgtctccccgctgagcccaggcacttgcccaggccgccctgcaggaccactgcaataaacgccttctcctgcca

SEQ ID NO: 104 - DNA, 4628 bp, Homo Sapiens
gaacgtagctagctgcaagcagaggccggcatgaccaccgagcagcgacgcagcctgcaagccttccaggattatatccggaagaccctggaccctacctacatcctgagctacatggccccctggtttagggaggaagaggtgcagtatattcaggctgagaaaaacaacaagggcccaatggaggctgccacactttttctcaagttcctgttggagctccaggaggaaggctggttccgtggctttttggatgccctagaccatgcaggttattctggactttatgaagccattgaaagttgggatttcaaaaaaattgaaaagttggaggagtatagattacttttaaaacgtttacaaccagaatttaaaaccagaattatcccaaccgatatcatttctgatctgtctgaatgtttaattaatcaggaatgtgaagaaattctacagatttgctctactaaggggatgatggcaggtgcagagaaattggtggaatgccttctcagatcagacaaggaaaactggcccaaaactttgaaacttgctttggagaaagaaaggaacaagttcagtgaactgtggattgtagagaaaggtataaaagatgttgaaacagaagatcttgaggataagatggaaacttctgacatacagattttctaccaagaagatccagaatgccagaatcttagtgagaattcatgtccaccttcagaagtgtctgatacaaacttgtacagcccatttaaaccaagaaattaccaattagagcttgctttgcctgctatgaaaggaaaaaacacaataatatgtgctcctacaggttgtggaaaaacctttgtttcactgcttatatgtgaacatcatcttaaaaaattcccacaaggacaaaaggggaaagttgtcttttttgcgaatcagatcccagtgtatgaacagcagaaatctgtattctcaaaatactttgaaagacatgggtatagagttacaggcatttctggagcaacagctgagaatgtcccagtggaacagattgttgagaacaatgacatcatcattttaactccacagattcttgtgaacaaccttaaaaagggaacgattccatcactatccatctttactttgatgatatttgatgaatgccacaacactagtaaacaacacccgtacaatatgatcatgtttaattatctagatcagaaacttggaggatcttcaggcccactgccccaggtcattgggctgactgcctcggttggtgttggggatgccaaaaacacagatgaagccttggattatatctgcaagctgtgtgcttctcttgatgcgtcagtgatagcaacagtcaaacacaatctggaggaactggagcaagttgtttataagccccagaagtttttcaggaaagtggaatcacggattagcgacaaatttaaatacatcatagctcagctgatgagggacacagagagtctggcaaagagaatctgcaaagacctcgaaaacttatctcaaattcaaaatagggaatttggaacacagaaatatgaacaatggattgttacagttcagaaagcatgcatggtgttccagatgccagacaaagatgaagagagcaggatttgtaaagccctgtttttatacacttcacatttgcggaaatataatgatgccctcattatcagtgagcatgcacgaatgaaagatgctctggattacttgaaagacttcttcagcaatgtccgagcagcaggattcgatgagattgagcaagatcttactcagagatttgaagaaaagctgcaggaactagaaagtgtttccagggatcccagcaatgagaatcctaaacttgaagacctctgcttcatcttacaagaagagtaccacttaaacccagagacaataacaattctctttgtgaaaaccagagcacttgtggacgctttaaaaaattggattgaaggaaatcctaaactcagttttctaaaacctggcatattgactggacgtggcaaaacaaatcagaacacaggaatgaccctcccggcacagaagtgtatattggatgcattcaaagccagtggagatcacaatattctgattgccacctcagttgctgatgaaggcattgacattgcacagtgcaatcttgtcatcctttatgagtatgtgggcaatgtcatcaaaatgatccaaaccagaggcagaggaagagcaagaggtagcaagtgcttccttctgactagtaatgctggtgtaattgaaaaagaacaaataaacatgtacaaagaaaaaatgatgaatgactctattttacgccttcagacatgggacgaagcagtatttagggaaaagattctgcatatacagactcatgaaaaattcatcagagatagtcaagaaaaaccaaaacctgtacctgataaggaaaataaaaaactgctctgcagaaagtgcaaagccttggcatgttacacagctgacgtaagagtgatagaggaatgccattacactgtgcttggagatgcttttaaggaatgctttgtgagtagaccacatcccaagccaaagcagttttcaagttttgaaaaaagagcaaagatattctgtgcccgacagaactgcagccatgactggggaatccatgtgaagtacaagacatttgagattccagttataaaaattgaaagttttgtggtggaggatattgcaactggagttcagacactgtactcgaagtggaaggactttcattttgagaagataccatttgatccagcagaaatgtccaaatgatatcaggtcctcaatcttcagctacagggaatgagtaactttgagtggagaagaaacaaacatagtgggtataatcatggatcgcttgtacccctgtgaaaatatattttttaaaaatatctttagcagtttgtactatattatatatgcaaagcacaaatgagtgaatcacagcactgagtattttgtaggccaacagagctcatagtacttgggaaaaattaaaaagcctcatttctagccttctttttagagtcaactgccaacaaacacacagtaatcactctgtacacactgggatagatgaatgaatggaatgttgggaatttttatctccctttgtctccttaacctactgtaaactggcttttgcccttaacaatctactgaaattgttcttttgaaggttaccagtgactctggttgccaaatccactgggcacttcttaaccttctatttgacctctgcgcatttggccctgttgagcactcttcttgaagctctccctgggcttctctctcttctagttctattctagtctttttttattgagtcctcctctttgctgatcccttccaagggttcaatatatatacatgtatatactgtacatatgtatatgtaactaatatacatacatacaggtatgtatatgtaatggttatatgtactcatgttcctggtgtagcaacgtgtggtatggctacacagagaacatgagaacataaagccatttttatgcttactactaaaagctgtccactgtagagttgctgtatgtagcaatgtgtatccactctacagtggtcagcttttagtagagagcataaaaatgataaaatacttcttgaaaacttagtttactatacatcttgccctattaatatgttctcttaacgtgtgccattgttctctttgaccattttcctataatgatgttgatgttcaacacctggactgaatgtctgttctcagatcccttggatgttacagatgaggcagtctgactgtcctttctacttgaaagattagaatatgtatccaaatggcattcacgtgtcacttagcaaggtttgctgatgcttcaaagagcttagtttgcggtttcctggacgtggaaacaagtatctgagttccctggagatcaacgggatgaggtgttacagctgcctccctcttcatgcaatctggtgagcagtggtgcaggcggggagccagagaaacttgccagttatataacttctctttggcttttcttcatctgtaaaacaaggataatactgaactgtaagggttagtggagagtttttaattaaaagaatgtgtgaaaagtacatgacacagtagttgcttgataatagttactagtagtagtattcttactaagacccaatacaaatggattatttaaaccaagtttatgagttggttttttttcattttctatttgtattttattaagagtgtcttttcttatgtgattttttttaattgctatttgatatggtttggctatatgtccccacccaaatctcatcttgaattataatccccatgtgtcaagggagggacctgacgggaggtgattggatcacgggggcagttgtccccatgctgttcttgggatagtgagttagttctcatgagatctgatggttttataagtgtttgacaattcctcctttacacacactctctctctcatctgctgccatgtaagacttgcctgcttccccttctgccatgattgtaagtttcctgaggcctcctcagccatgtggaactgtgaatctattaagcctcttttctttataaatga

SEQ ID NO: 105 - DNA, 5291 bp, Homo Sapiens
gccaggaaagcagagacagacaaagcgttaggagaagaagagaggcagggaagacaagccaggcacgatggccaccttcccaccagcaaccagcgccccccagcagcccccaggcccggaggacgaggactccagcctggatgaatctgacctctatagcctggcccattcctacctcggaggtggaggccggaaaggtcgcaccaagagagaagctgctgccaacaccaaccgccccagccctggcgggcacgagaggaaactggtgaccaagctgcagaattcagagaggaagaagcgaggggcacggcgctgagacagagctggagatgaggccagaccatggacactacacccagcaatagagacgggactgcggaggaaggaggacccaggacaggatccaggccggcttgccacaccccccacccctaggacttattcccgctgactgagtctctgaggggctaccaggaaagcgcctccaaccctagcaaaagtgcaagatggggagtgagaggctgggaatggaggggcagagccaggaagatcccccagaaaagaaagctacagaagaaactggggctcctccagggtggcagcaacaataaatagacacgcacggcagccacagcttgggtgtgtgttcatccttgttctttgtgtgtttttgttcgggcatgtgtgtgcttgcctgtgcctgcacattcatgagcctgagagagcatctttgatgtgtatttgtgtttggtgtatgtatctggggcagggagtgttcctgctcttgcagggtctacgctgtgaatgcagcttttggtttgtttgcttttgcttgcatatattttagtgcatacatttctgtgggctcctacgtagtggaaaggaatttcttctgcttttttgcgatactgcccatgaaacacggccctccccagcacctgtttttgttgattgtgtcctgttcatagacgggaacgctacttatgagtgccatctaaaagtcagagaaaactgagatttaaaatattaaaagccagggccgggggcagtggctcacgcctgtaatcccagcactttgggaggccgaggtgggtggatcacaaagtcaggagttcaagaccagcctgaccaacatggtgaaaccccatctccactaaaaataccaaaaattagccaagcatggtggcaggtgcctgtaatcccagctgctcaggaggctgaggcagtagaatcgcttgaacccaggaggtagaggttgcagtgagccgacatcgtgccattgcactccagcctgggtgacagagggagactctgtctcaaaacaaacaaacaaacaaaaactaaagtctgggagcagtggctcatgcctgtaatcacagcagtttaggaggccgaagtgggaggattacttgagcctaggagtttgagaccagcctgagcatcatagtaagaccccatctctacaattttttttttgagacagagtctcactctgttgctcaggttagagtgcagtggcaccatcttggctcactgcaacctctgcctcccgggttcaagcaattctcgtgcctacgccccctgagtagctgggattacaggtgagcaccaccacgcctggctaatttttgtttttttgtttttttgatacagagtctcactctgttgctcaggctggagtgcagtggcatgatcgcagctcactgcaacctccgcctcctgggttcaagctattctcctgcttcagcctcctgagtagctgggactacaggcacctgccaccatgcctggctaatttttgtatttttagtagaaacagagtttcaccatgttggccaggatggtctcaatctcttgacctcatgatccacccaccttggcctcccaaagtgctgggattacaggcgtcagccaccacgcctggccaatttttgtatttttagtagagatggggtttcatcatgttggccaggctggtctcaaactcctggcctcaaatgatctgcccacctcagccttccagcctttgggaggccaaggagggaggatcgcttgaggccaggagttcgagaccagcctaggcaacataccaaggccctgtctctacaaaaatttaaaaattagcaaagcatggtggctcatgcctgtagtcctagttgctcagaggctgaagttggaggatcccttgaacccagttggaggctacagtaagccatgatggtgccactgcactgcagcctgagcaatagagtgaaaccatgtattgaaaaagaaagaaagaaagaaagagaaaaagaaggaaggaaggaaaagaaaggaaggaagaaagaaaagaaagagagaaaggagagaaaaagaagaaagagagagaaagagaagaaagaaagaaagaaagaaagaaagaaagaaagaaagaaagaaagaaaggaaggaaggaaagaaagaaagaaagaaggaaagaaagaaagaaagaaagaaagaaagaaagaaagaaaagagcgagccccggcacagtggctcacacctgtaatcccagcactttgggaggccaaggcaggcggatcacctgaggtcagtagttcgagttcgaggcagaagttgtggtgagccaagatcacgccattgcactccagcctgggcaacaagagcaaaactccatctcaaaaaaagaaaaagagagagaaagaaagagagaaggagggaaagaaagaggaaggaaaggagggagggaaggagggaaggaggaaaggagggaaggaaatattaagggatttgccctagctcactcagggctcatattcagggatcttattgtcttcagatatgaggtgggtccccaggccaagggggctgtgggacagggttctgggaagtgagatgggggagggagattcttattcagtgctatgtctcaggaccagagttgaagaaaaatatggggcaaacaggaagtgtggttggagctgagattatttgttgattgagatacaggtttgggttgctattatgaagaatcaaaacaggatacaaagttactcctctcttacttagccccaagtcctcctgggttcaaatggcagctccattgtgttgaggattccagctatttttactcactgttctgccacacccaaaacatggcttccactttgaggcccaaaatagctactccaatacctgccatcacgtttgcatctcagcctgtggaaagagtgtggaagagacagaggaggccacacctcttcaattttagggcataatctaaaagtagaacacatcacatctgctccgaatgtggctacatggccacacccaactacgagagaggttgggaaatgtagcattgagctgcttagccacgtggtagccaaaacttgggcaacagcagggttttatgatgaaagggaaccagagagagtgaatacacgaagaagctagcaagaaacattgcccacatgcagactcaacagatgtcgggggagaaaactctgagattgggccccgggcagagcctgtttccttttcccctgtccctttcacataagccccacactgcagaacttggagtcagtggttcatggggacccaaggacatccacagaagaccgaagtacctgatagagcaggaacagatgcacgtcagactacgaccagcttgaacccttggggacctgtatccatccccttcccttgagtccagcctaatcacagccacagaatgaatccatgacccggaaggacatttaaggacctctggcccaactctccccacgcaacagtgggattgcctctgcttgtttgaataccactatggagggggaacttgctacatttaaaggttgctgaatttttttgttttgttttgggagatggagtctctctctgtcgcccaggctggagtgcagtggtgtgatctcgacccactgcaacctccgcttcctgggttcaagcgattttcatgcctcagcctccctagtagctgggactacaggtgtgggccaccacacctggctaatttttgtatttttagtagagacggggtttcaccatgttgcccaggctggtctcaaactcccgacctcaggtgatctgcctgccttggcctcccaaagtgttgggattacaggcttgagccacaccacccggcaaaggttgcctaattctatctcagggcaagtctgttcatgtgggctgaaatctgtctctcatacctgcccttaaataagcttctgtttttctggtcctttctgtctgagatgactttaattcctcccccgaccccatctcatgaggctcagcttagatgtttccttctcttcctccctgatggctgcgtgcagaagctcatacctgcaatcccagcactttgggaggccgaggtgggaggattgcttgggcccaggagttctaggccagcctagcaacacagcaagaccctctctctacaaaaaattaaaaattagccaggtgtggtggcttgtgcctgtgggcccacctactcaggaggctgaggtgagaggatctcttgagtctgggaggtggaggctgcagtgagccatgatctcactccagcctgggcgtcagagtgagacctgtctcaaaaaaacaaaaaccaaagttttccttaacttgcaatcctccacccatctcctgacctccaccccaggccgaccctcctctgggatcacacggaagcctgggcccagaatcttacagtctaccttggaaatccttcagattttgcctccaactcctctttccatacaagttacatattaactcaatcaatgcttattggatgccttctgagttaccaggatgctgctggaggcctgtgctgctgagagggacaaatagaatcctgatatgactggaaccaggaatagggccaccatcagctctagaacccagggagcaaatggcaggagcaacaccaggcagtcggccctcagcccagcacagacctggtgtgttggcttcagaaaatcctggaaacatctctgctgtgtttggagctcctattctgtgagaagtgttttataggctttgctccatttaatccttacgataacccaataggacatactattaatgatcccctttttttcagaccggaaaactgaggttcggagacattaagtaatttgcctaaagtcacacagccacatcctgtaggacttggaattatgaactcaggtctatctgaattttaaagcctggatttttccccctttgctacatgcctgggaagaaccatgtattgacaatgaagaatcctaaactctcgttaa

SEQ ID NO: 106 - DNA, 3210 bp, Homo Sapiens
agaagccactttaaaaaacaaagcaaaaggctcagaggtaacagcctccagtgaatctgatccatgtgtaaggaaaacaggatgcgtccctggaccggctggtagcaagatttatgtttcagaatattgcaacataacttccttccctctgttgcctttgtgcattgtttgaaggaggagaataaaggactacttttgcagcacagcagtctgtaaagatggatggcatggggttagtttaaatagcatattggcctttctgggtcactgtgggcaaccttgtccctggtttattttaacacctgctttaatgcctccatgatacaactgaatgggcatctttcattcattcgtctgttacttctgaatgaagctacttggggttcgttagaatgatggcaagtgagaatgcagtcgtctctaggtcattacttgtaatacgttctgaggactgcctttgctgatggggggagaaggactctcacagctgtagccagcgttcatgtttggtcattgctggaactctcaggaagcctgaaactgtgaactttgtagcagaaaaggaagatagatgaagagaatgaggcaaacttgctagcagtcctcacagagacactagacagtctccctgtggatgaagacggattgccctcatttgatgcgctgacagatggagacgtgaccactgacaatgaggctagtccttcctccatgcctgacggcacccctccaccccaggaggcagaagagccgtctctacttaagaagctcttactggcaccagccaacactcagctaagttataatgaatgcagtggtctcagtacccagaaccatgcaaatcacaatcacaggatcagaacaaaccctgcaattgttaagactgagaattcatggagcaataaagcgaagagtatttgtcaacagcaaaagccacaaagacgtccctgctcggagcttctcaaatatctgaccacaaacgatgaccctcctcacaccaaacccacagagaacagaaacagcagcagagacaaatgcacctccaaaaagaagtcccacacacagtcgcagtcacaacacttacaagccaaaccaacaactttatctcttcctctgaccccagagtcaccaaatgaccccaagggttccccatttgagaacaagactattgaacgcaccttaagtgtggaactctctggaactgcaggcctaactccacccaccactcctcctcataaagccaaccaagataacccttttagggcttctccaaagctgaagtcctcttgcaagactgtggtgccaccaccatcaaagaagcccaggtacagtgagtcttctggtacacaaggcaataactccaccaagaaagggccggagcaatccgagttgtatgcacaactcagcaagtcctcagtcctcactggtggacacgaggaaaggaagaccaagcggcccagtctgcggctgtttggtgaccatgactattgccagtcaattaattccaaaacagaaatactcattaatatatcacaggagctccaagactctagacaactagaaaataaagatgtctcctctgattggcaggggcagatttgttcttccacagattcagaccagtgctacctgagagagactttggaggcaagcaagcaggtctctccttgcagcacaagaaaacagctccaagaccaggaaatccgagccgagctgaacaagcacttcggtcatcccagtcaagctgtttttgacgacgaagcagacaagaccggtgaactgagggacagtgatttcagtaatgaacaattctccaaactacctatgtttataaattcaggactagccatggatggcctgtttgatgacagcgaagatgaaagtgataaactgagctacccttgggatggcacgcaatcctattcattgttcaatgtgtctccttcttgttcttcttttaactctccatgtagagattctgtgtcaccacccaaatccttattttctcaaagaccccaaaggatgcgctctcgttcaaggtccttttctcgacacaggtcgtgttcccgatcaccatattccaggtcaagatcaaggtctccaggcagtagatcctcttcaagatcctgctattactatgagtcaagccactacagacaccgcacgcaccgaaattctcccttgtatgtgagatcacgttcaagatcgccctacagccgtcggcccaggtatgacagctacgaggaatatcagcacgagaggctgaagagggaagaatatcgcagagagtatgagaagcgagagtctgagagggccaagcaaagggagaggcagaggcagaaggcaattgaagagcgccgtgtgatttatgtcggtaaaatcagacctgacacaacacggacagaactgagggaccgttttgaagtttttggtgaaattgaggagtgcacagtaaatctgcgggatgatggagacagctatggtttcattacctaccgttatacctgtgatgcttttgctgctcttgaaaatggatacactttgcgcaggtcaaacgaaactgactttgagctgtacttttgtggacgcaagcaatttttcaagtctaactatgcagacctagattcaaactcagatgactttgaccctgcttccaccaagagcaagtatgactctctggattttgatagtttactgaaagaagctcagagaagcttgcgcaggtaacatgttccctagctgaggatgacagagggatggcgaatacctcatgggacagcgcgtccttccctaaagactattgcaagtcatacttaggaatttctcctactttacactctctgtacaaaaacaaaacaaaacaacaacaatacaacaagaacaacaacaacaataacaacaatggtttacatgaacacagctgctgaagaggcaagagacagaatgatatccagtaagcacatgtttattcatgggtgtcagctttgcttttcctggagtctcttggtgatggagtgtgcgtgtgtgcatgtatgtgtgtgtgtatgtatgtgtgtggtgtgtgtgcttggtttaggggaagtatgtgtgggtacatgtgaggactgggggcacctgaccagaatgcgcaagggcaaaccatttcaaatggcagcagttccatgaagacacgcttaaaacctagaacttcaaaatgttcgtattctattc

SEQ ID NO: 107 - DNA, 582 bp, Homo Sapiens
acatcctgctcaccggtcagggcgcgcggccgggagggactgggctggggcaggctgggggcgcagagtgctctgggcatcgggcgcccaggtacaccaggggttggaaaaaccacactaggcaaagaacttgcgtcaaaatcaggactgaaatacattaatgtgggtgatttagctcgagaagtctgatcatcggatatcatggagtctggcaagacggcttctcccaagagcatgccgaaagatgcacagatgatggcacaaatcctgaaggatatggggattacagaatatgagccaagagttataaatcagatgttggagtttgccttccgatatgtgaccacaattctagatgatgcaaaaatttattcaagccatgctaagaaagctactgttgatgcagatgatgtgcgattggcaatccagtgccgcgctgatcagtcttttacctctcctcccccaagagattttttattagatattgcaaggcaaagaaatcaaacccctttgccattgatcaagccatattcaggtcctaggttgccacctgatagatactgcttaacagctccaaactat

SEQ ID NO: 108 - DNA, 1110 bp, Homo Sapiens
aagcccctgcagggagcgggcccgggcggcgcgcgatcgaggtcgggtcgccgtccagcctgcagcatgagcgcccccagcgcgacccccatcttcgcgcccggcgagaactgcagccccgcgtggggggcggcgcccgcggcctacgacgcagcggacacgcacctgcgcatcctgggcaagccggtgatggagcgctgggagaccccctatatgcacgcgctggccgccgccgcctcctccaaagggggccgggtcctggaggtgggctttggcatggccatcgcagcgtcaaaggtgcaggaggcgcccattgatgagcattggatcatcgagtgcaatgacggcgtcttccagcggctccgggactgggccccacggcagacacacaaggtcatccccttgaaaggcctgtgggaggatgtggcacccaccctgcctgacggtcactttgatgggatcctgtacgacacgtacccactctcggaggagacctggcacacacaccagttcaacttcatcaagaaccacgcctttcgcctgctgaagccggggggcgtcctcacctactgcaacctcacctcctggggggagctgatgaagtccaagtactcagacatcaccatcatgtttgaggagacgcaggtgcccgcgctgctggaggccggcttccggagggagaacatccgtacggaggtgatggcgctggtcccaccggccgactgccgctactacgccttcccacagatgatcacgcccctggtgaccaaaggctgagcccccaccccggcccggccacacccatgccctcctccgtgccttcctggccgggagtccagggtgtcgcaccagccctgggctgatcccagctgtgtgtcaccagaagctttcccggcttctctgtgaggggtcccaccagcccagggctgatcccagctgtgtgtcaccagcagctttcccagcttctctgtgagggtcactgctgcccactgcagggtccctgaggtgaagtaaacgccggcgctgggcttggccagtcggcagtgagcgtgcgactgttacttccagcggctgctccctcacctcccgcccatcccatggacacaggaa

SEQ ID NO: 109 - DNA, 1989 bp, Homo Sapiens
accgagctggcggtggctacggcgacgggagccggcggcgctgcgggtcagcggtcgcgtaggacccagcggactcggcagcctggggcgcccggcggagctgaaccgcggcccccggtggtgggctcagccggtcgagctgcgcgggaggcaaatgaagataaaacaatgttcgccaacctaaaatacgtttccctgggaattttggtctttcagactaccagtttggttctaacaatgcgttattccagaactttaaaagaagaaggacctcgttatctatcttctacagcagtggttgttgctgaacttttgaagataatggcctgcattttattggtctacaaagacagcaaatgtagtctaagagcactgaatcgagtactacatgatgaaattcttaataaacctatggaaacacttaaacttgctattccatcagggatctatactcttcagaataatttactgtatgtggcactatcaaatctagatgcagctacttatcaggtcacgtatcagttaaaaattcttacaacagcattattttctgtgtctatgcttagtaaaaaattgggtgtataccagtggctgtccctagtaattttgatgacaggagttgcttttgtacagtggccctcagattctcagcttgattctaaggaactttcagctggttctcaatttgtaggactcatggcagttctcacagcatgtttttcaagtggctttgctggggtttactttgagaaaatcttaaaagaaacaaaacaatcagtgtggataagaaatattcagcttggtttctttggaagtatatttggattaatgggtgtatacatttatgatggagaactggtatcaaagaatggattttttcagggatataaccgactgacctggatagtagttgttcttcagtgtctttttccttggagccatccttgtaataacagctacttttttgtatggttatgatcccaaacctgcaggaaatcccactaaagcatagttgtatactatctttaactggtttttcacgatggggcactaggaatctcgacattaatcttgcacagaggacttctacagagtctgagaagatatcatcatgctgaatctgatcatactgttttttaaaagtttaaggataagacatgtgtatatgtaacaaaacacattgcatctagaaatcaaaacttgaaagtatttccagggattaggattagaaggaatattagaggaaacttgaaatctgagtttaaaaagattttacctttttgattgctgcagaaatgtcctatgcactctttgcaagagcacacaacaaatgtcagataccaatttttgcaaattagatttaatcttattaaatgtttttatcttactctttctgtacagatatatcaaatcacatgaaatatttaaagtttgaaaattataattacctataaagctgtgaaaaatagaagtataatttgaaaaaacatttcacttatcagagatttttatatttatacaaaagattactaaatgaaggattgctaaatgtttttggttcaattacataaaaattaatattctgggtctgatctgtcagagaataaatatcaaatctaaatttaatgtagagatacatactatttctccatatgaattttaagatattttagtgcttcaagactgctgaaagcaatccagttgctcctgtgctagatggtagccagagaattttatagtaatggaggttagcccttaatctcttcattgcatttcatttctgtaaatcagattaagtccttaatattattttaaattaaaatttgtgtgtaattgccattaaattttcaaaatgtaatttaaaaggattaaatactcatttaataatttaaaataattattgtataatatctacatttggagaattttgaactatcaagcatatactgtatacagttagaaagttattaaatgaacattttactcatt

SEQ ID NO: 110 - DNA, 4622 bp, Homo Sapiens
agtttcagtttcctggctctgggcagcagcaagaattcctctgcctcccatcctaccattcactgtcttgccggcagccagctgagagcaatgggaaatggggagtcccagctgtcctcggtgcctgctcagaagctgggttggtttatccaggaatacctgaagccctacgaagaatgtcagacactgatcgacgagatggtgaacaccatctgtgacgtcctgcaggaacccgaacagttccccctggtgcagggagtggccataggtggctcctatggacggaaaacagtcttaagaggcaactccgatggtacccttgtcctcttcttcagtgacttaaaacaattccaggatcagaagagaagccaacgtgacatcctcgataaaactggggataagctgaagttctgtctgttcacgaagtggttgaaaaacaatttcgagatccagaagtcccttgatgggttcaccatccaggtgttcacaaaaaatcagagaatctctttcgaggtgctggccgccttcaacgctctgagcttaaatgataatcccagcccctggatctatcgagagctcaaaagatccttggataagacaaatgccagtcctggtgagtttgcagtctgcttcactgaactccagcagaagttttttgacaaccgtcctggaaaactaaaggatttgatcctcttgataaagcactggcatcaacagtgccagaaaaaaatcaaggatttaccctcgctgtctccgtatgccctggagctgcttacggtgtatgcctgggaacaggggtgcagaaaagacaactttgacattgctgaaggcgtcagaaccgtactggagctgatcaaatgccaggagaagctgtgtatctattggatggtcaactacaactttgaagatgagaccatcaggaacatcctgctgcaccagctccaatcagcgaggccagtaatcttggatccagttgacccaaccaataatgtgagtggagataaaatatgctggcaatggctgaaaaaagaagctcaaacctggttgacttctcccaacctggataatgagttacctgcaccatcttggaatgttctgcctgcaccactcttcacgaccccaggccaccttctggataagttcatcaaggagtttctccagcccaacaaatgcttcctagagcagattgacagtgctgttaacatcatccgtacattccttaaagaaaactgcttccgacaatcaacagccaagatccagattgtccggggaggatcaaccgccaaaggcacagctctgaagactggctctgatgccgatctcgtcgtgttccataactcacttaaaagctacacctcccaaaaaaacgagcggcacaaaatcgtcaaggaaatccatgaacagctgaaagccttttggagggagaaggaggaggagcttgaagtcagctttgagcctcccaagtggaaggctcccagggtgctgagcttctctctgaaatccaaagtcctcaacgaaagtgtcagctttgatgtgcttcctgcctttaatgcactgggtcagctgagttctggctccacacccagccccgaggtttatgcagggctcattgatctgtataaatcctcggacctcccgggaggagagttttctacctgtttcacagtcctgcagcgaaacttcattcgctcccggcccaccaaactaaaggatttaattcgcctggtgaagcactggtacaaagagtgtgaaaggaaactgaagccaaaggggtctttgcccccaaagtatgccttggagctgctcaccatctatgcctgggagcaggggagtggagtgccggattttgacactgcagaaggtttccggacagtcctggagctggtcacacaatatcagcagctctgcatcttctggaaggtcaattacaactttgaagatgagaccgtgaggaagtttctactgagccagttgcagaaaaccaggcctgtgatcttggacccagccgaacccacaggtgacgtgggtggaggggaccgttggtgttggcatcttctggcaaaagaagcaaaggaatggttatcctctccctgcttcaaggatgggactggaaacccaataccaccttggaaagtgccggtaaaagtcatctaaaggaggcgttgtctggaaatagccctgtaacaggcttgaatcaaagaacttctcctactgtagcaacctgaaattaactcagacacaaataaaggaaacccagctcacaggagcttaaacagctggtcagccccctaagcccccactacaagtgatcctcaggcaggtaaccccagattcatgcactgtagggtgctgcgcagcatccctagtctctacccagtagatgccactagccctcctctcccagtgacaaccaaaagtcttcagacattgtcaaacgttcccctgggttcacagatctttctgcctttggcttttggctccaccctctttagctgttaatttgagtacttatggccctgaaagcggccacggtgcctccagatggcaggtttgcaatccaagcaggaagaaggaaaagatacccaaaggtcaagaacacagtgattttattagaagtttcatccgcaaattttcttccatttcattgctcagaaatgtcatgtggctacctgtaacttgaaggtggctacaaagatgactgtggacgtgggttgcactggccacccaaggatgtctgccacacctctccaaagccctccctacctaccaagatatacctgatatattccaccaggatatcctccctccagatatacttggttctctccaccaggttctttctttaaagcaggatttctcaactttgatacttactcacatttggggctagacagttctttgtttggaggctctcttgtgcattgtaggatgttgagcagcatctctggcctgtacccagtagatgccacccagttgtgacaattaaaagtgtcttgagactttatcatgtgtcttctgccctaggtgagaacccttgcactagaggaaccctacaccccaaccctggggggaatgtagggaagaggtggccaagccaaccgtggggttagctctaattattaagatatgcattataaataaataccaaaaaattgtctctggcaatagttaccttcccagatacaggtccccccttttttcccctaactcttttaagcaatgattgtaactattaggagacattgctctcccacgtatgtttttctttttagacaatgcagacaccaggaagttgtggagctaggatccatcctattgtcaatgagatgttctcatccagaagccatagaatcctgaataataattctaaaagaaacttctagagatcatctggcaatcgcttttaaagactcggctcaccgtgagaaagagtcactcacatccattcttcccttgatggtccctattcctccttcccttgcttcttggacttcttgaaatcaatcaagactgcaaaccctttcataaagtcttgccttgctgaactccctctctgcaggcagcctgcctttaaaaatagttgctgtcatccactttatgtgcatcttatttctgtcaacttgtattttttttcttgtatttttccaattagctcctcctttttccttccagtctaaaaaaggaatcctctgtgtcttcaaagcaaagctctttactttccccttggttctcataactctgtgatcttgctctcggtgcttccaactcatccacgtcctgtctgtttcctctgtatacaaaaccctttctgcccctgctgacacagacatcctctatgccagcagccagccaaccctttcattagaacttcaagctctccaaaggctcagattataactgttgtcatatttatatgaggctgttgtcttttccttctgagcctgcctttctcccccccacccaggagtatcctcttgccaaatcaaaagactttttccttgggctttagccttaaagatacttgaaggtctaggtgctttaacctcacataccctcacttaaacttttatcactgttgcatataccagttgtgatacaataaagaatgtatctggattttgtgcctagttcctagcacacagcttcaaaaattctagagtttcctgataggagtgtcttttgtattcataacaagcccttttcacccatgcctgggtttatgctaacaaggttacccatggtgggcccttagtttcaaggaaggagttggccaagccagaaagaccaagcatgtggttaaagcattggaattttcagccccatcccacccccaatctccaaggaggtgatggggctggaaattgagttcaattttaacatggccagtgatttaagcaatgctgcctatgtaaagaaaccccaataaaaactctggacagtgaggcttggggagcttcctgattggcagacattccaatgtactaggaaggtagcgcatcttgattccacagggacaaaggctcctgagctctgggcccttccagtgcttgccaccctacatactctttgtctggctcttcatttgtattctttataataaaatggtgattgtaagtagagca

SEQ ID NO: 111 - DNA, 1497 bp, Homo Sapiens
gacgcctcctgcagcgcctggagccacacagggatccggagcctgggggaaaagcggcgcgggagccggcacccaccgctggaggggcggcgacggcggccgtagcgacctcgggaggcaagcggagccgccatggccgagttcccgtcgaaagttagcacgcggaccagcagtcctgcgcagggcgccgaagcctcggtgtcggcgctgcgcccggacctgggcttcgtgcgctcccgcctcggggcgctcatgctgctgcagctggtgctggggctgctggtgtgggcgctgattgcggacaccccgtaccacctgtatccggcctatggctgggtgatgttcgtcgctgtcttcctctggctggtgacaatcgtcctcttcaacctctacctgtttcagctgcacatgaagttgtacatggttccctggccactggtgttaatgatctttaacatcagcgccaccgttctctacatcaccgccttcatcgcctgctctgcggcagttgacctgacatccctgaggggcacccggccttataaccagcgcgcggctgcctcgttctttgcgtgtttggtgatgatcgcctatggagtgagtgccttcttcagctaccaggcctggcgaggagtaggcagcaatgcggccaccagtcagatggctggcggctatgcctaaaccacctgtgccacggccccctctggggctgaagccgccgctgggtcacagagcagggtcaccctgcaagcctgaagctggggagccctgcgtggagtcagcccaacagggactgcatttgctcctctctgcccgtcagacataagctctcacagcgctaaggaagcaggcccaggctggcaggcatctcggcttgcaggaggccaactgctgagacctcttctccatcccccttattcagtggaagatgacgggggatctgaggctgtgtctctgccttgtctttagaggacttcagcgtccaagactggggcccacccttctcaccagcactaaatgcactaacaaggactccagacctgcagccccagacccgccgtagtataagcctaacaagcaacacgtagcaccttagtctttgttccaggagagctgagcaagctggtgaaaccactctccttcctttaaacaccgtttcaaccaacctctccctggagccaacctgtaaaaagtgggttgattgctgacagcatggtcttccctccctgcatttcagacataccagttactgaaagcaaatcagttttaagtgatttctcagtgctgaaaagcctgtccaggtttccttccctttcccaagcctctctctgtaatactccctttgggcgaagctaacatcggtgcctccccgaccttgctgactaggcacatgggacgcaaaggagggagggaagcaaggccttgcctggcgagttgtcatgtggttggtggtgactgttttattttttttaataaaaataaagatgagagaaatta

SEQ ID NO: 112 - DNA, 785 bp, Homo Sapiens
acagcaaatgtttgaatttgatacgaagacatcagcaaaagaagaagatgcttttcactttgtcagttatgttcctgttaatgggagactgtatgaattagatggattaagagaaggaccgattgatttaggtgcatgcaatcaagatgattggatcagtgcagtaaggcctgtcatagaaaaaaggatacaaaagtacagtgaaggtgaaattcgatttaatttaatggccattgtgtctgacagaaaaatgatatatgagcagaagatagcagagttacaaagacaacttgcagaggaggaacccatggatacagatcaaggtaatagtatgttaagtgctattcagtcagaagttgccaaaaatcagatgcttattgaagaagaagtacagaaattaaaaagatacaagattgagaatatcagaaggaagcataattatctgcctttcattatggaattgttaaagactttagcagaacaccagcagttaataccactagtagaaaagtttgagaaacactttgagaagacactactaggcaaataaaattttggaccattaacttaaagacgagaatacatgggaaaataggataaaagaacaaggtgtgagaaggaatagaaggaaacaaacaggaaagatatggctgcaccatgcagtgctactatatgctgagattctacaggatgagatttttgaatagctgaggcagttgcctataatctgtgatgacataaaagtatttgacctaaaatctttttatttgcaaaataataaataa

SEQ ID NO: 113 - DNA, 1296 bp, Homo Sapiens
tggggtgggggcggggcctggctgggcgccgggacgggaggagtcccggcggcgcctcggacttttgctcccacaagtcctgcctcggaggcgggggagctggaccagcagccgcctggagcgtccgagtcaccgtcgccggggctcccgcgctccccagaacggtgggacgcggggctcggcagccgccagcggaacatggcgccctggacgctgtggcgctgctgccagcgcgtcgtgggctgggtgccggtgctcttcatcaccttcgtggtcgtctggtcctactacgcgtacgtggtggagctctgcgtgtttactatttttggaaatgaagaaaatggaaagaccgttgtttaccttgtggctttccatctgttctttgttatgtttgtatggtcctattggatgacaattttcacatctcccgcttccccctccaaagagttctacttgtccaattctgaaaaggaacgttatgaaaaagaattcagccaagaaagacaacaagaaattttgagaagagcagcaagagctttacctatctataccacatcagcttcaaaaactatcagatattgtgaaaaatgtcagctgattaaacctgatcgggcgcatcactgctcagcctgtgactcatgtattcttaagatggatcatcactgtccttgggtgaataactgtgtgggattttctaattacaaattcttcctgctgtttttattgtattccctattatattgccttttcgtggctgcaacagttttagagtactttataaaattttggacgaatgaactgacagatacacgtgcaaaattccacgtactttttcttttctttgtgtctgcaatgttcttcatcagcgtcctctcacttttcagctaccactgctggctagttggaaaaaatagaacaacaatagaatcattccgcgcacccacgttttcatacggacctgatggaaatggtttctctcttggatgcagtaaaaattggagacaagtctttggtgatgaaaagaaatattggctacttccaatattttcaagcttgggtgatggttgcagttttccaactcgccttgtggggatggatccagaacaagcttctgttacaaaccagaatgagtatgccagaagtagtggctcaaatcaaccttttcctatcaaaccacttagtgaatcaaaaaaccgcttgttggacagtgaatctcagtggctggagaatggagctgaagaaggcatcgtcaaatcagggacaaataaccatgtaacagtggcaatagaaaattga

SEQ ID NO: 114 - DNA, 6599 bp, Homo Sapiens
agaaatccgaaggccgcgccagagccctgcttccccttgcacctgcgccgggcggccatggacttgtacagcaccccggccgctgcgctggacaggttcgtggccagaaggctgcagccgcggaaggagttcgtagagaaggcgcggcgcgctctgggcgccctggccgctgccctgagggagcgcgggggccgcctcggtgctgctgccccgcgggtgctgaaaactgtcaagggaggctcctcgggccggggcacagctctcaagggtggctgtgattctgaacttgtcatcttcctcgactgcttcaagagctatgtggaccagagggcccgccgtgcagagatcctcagtgagatgcgggcatcgctggaatcctggtggcagaacccagtccctggtctgagactcacgtttcctgagcagagcgtgcctggggccctgcagttccgcctgacatccgtagatcttgaggactggatggatgttagcctggtgcctgccttcaatgtcctgggtcaggccggctccggcgtcaaacccaagccacaagtctactctaccctcctcaacagtggctgccaagggggcgagcatgcggcctgcttcacagagctgcggaggaactttgtgaacattcgcccagccaagttgaagaacctaatcttgctggtgaagcactggtaccaccaggtgtgcctacaggggttgtggaaggagacgctgcccccggtctatgccctggaattgctgaccatcttcgcctgggagcagggctgtaagaaggatgctttcagcctagccgaaggcctccgaactgtcctgggcctgatccaacagcatcagcacctgtgtgttttctggactgtcaactatggcttcgaggaccctgcagttgggcagttcttgcagcggcagcttaagagacccaggcctgtgatcctggacccagctgaccccacatgggacctggggaatggggcagcctggcactgggatttgctagcccaggaggcagcatcctgctatgaccacccatgctttctgagggggatgggggacccagtgcagtcttggaaggggccgggccttccacgtgctggatgctcaggtttgggccaccccatccagctagaccctaaccagaagacccctgaaaacagcaagagcctcaatgctgtgtacccaagagcagggagcaaacctccctcatgcccagctcctggccccactggggcagccagcatcgtcccctctgtgccgggaatggccttggacctgtctcagatccccaccaaggagctggaccgcttcatccaggaccacctgaagccgagcccccagttccaggagcaggtgaaaaaggccattgacatcatcttgcgctgcctccatgagaactgtgttcacaaggcctcaagagtcagtaaagggggctcatttggccggggcacagacctaagggatggctgtgatgttgaactcatcatcttcctcaactgcttcacggactacaaggaccaggggccccgccgcgcagagatccttgatgagatgcgagcgcagctagaatcctggtggcaggaccaggtgcccagcctgagccttcagtttcctgagcagaatgtgcctgaggctctgcagttccagctggtgtccacagccctgaagagctggacggatgttagcctgctgcctgccttcgatgctgtggggcagctcagttctggcaccaaaccaaatccccaggtctactcgaggctcctcaccagtggctgccaggagggcgagcataaggcctgcttcgcagagctgcggaggaacttcatgaacattcgccctgtcaagctgaagaacctgattctgctggtgaagcactggtaccgccaggttgcggctcagaacaaaggaaaaggaccagcccctgcctctctgcccccagcctatgccctggagctcctcaccatctttgcctgggagcagggctgcaggcaggattgtttcaacatggcccaaggcttccggacggtgctggggctcgtgcaacagcatcagcagctctgtgtctactggacggtcaactatagcactgaggacccagccatgagaatgcaccttcttggccagcttcgaaaacccagacccctggtcctggaccccgctgatcccacctggaacgtgggccacggtagctgggagctgttggcccaggaagcagcagcgctggggatgcaggcctgctttctgagtagagacgggacatctgtgcagccctgggatgtgatgccagccctcctttaccaaaccccagctggggaccttgacaagttcatcagtgaatttctccagcccaaccgccagttcctggcccaggtgaacaaggccgttgataccatctgttcatttttgaaggaaaactgcttccggaattctcccatcaaagtgatcaaggtggtcaagggtggctcttcagccaaaggcacagctctgcgaggccgctcagatgccgacctcgtggtgttcctcagctgcttcagccagttcactgagcagggcaacaagcgggccgagatcatctccgagatccgagcccagctggaggcatgtcaacaggagcggcagttcgaggtcaagtttgaagtctccaaatgggagaatccccgcgtgctgagcttctcactgacatcccagacgatgctggaccagagtgtggactttgatgtgctgccagcctttgacgccctaggccagctggtctctggctccaggcccagctctcaagtctacgtcgacctcatccacagctacagcaatgcgggcgagtactccacctgcttcacagagctacaacgggacttcatcatctctcgccctaccaagctgaagagcctgatccggctggtgaagcactggtaccagcagtgtaccaagatctccaaggggagaggctccctacccccacagcacgggctggaactcctgactgtgtatgcctgggagcagggcgggaaggactcccagttcaacatggctgagggcttccgcacggtcctggagctggtcacccagtaccgccagctctgtatctactggaccatcaactacaacgccaaggacaagactgttggagacttcctgaaacagcagcttcagaagcccaggcctatcatcctggatccggctgacccgacaggcaacctgggccacaatgcccgctgggacctgctggccaaggaagctgcagcctgcacatctgccctgtgctgcatgggacggaatggcatccccatccagccatggccagtgaaggctgctgtgtgaagttgagaaaatcagcggtcctactggatgaagagaagatggacaccagccctcagcatgaggaaattcagggtcccctaccagatgagagagattgtgtacatgtgtgtgtgagcacatgtgtgcatgtgtgtgcacacgtgtgcatgtgtgtgttttagtgaatctgctctcccagctcacacactcccctgcctcccatggcttacacactaggatccagactccatggtttgacaccagcctgcgtttgcagcttctctgtcacttccatgactctatcctcataccaccactgctgcttcccacccagctgagaatgccccctcctccctgactcctctctgcccatgcaaattagctcacatctttcctcctgctgcaatccatcccttcctcccattggcctctccttgccaaatctaaatagtttatatagggatggcagagagttcccatctcatctgtcagccacagtcatttggtactggctacctggagccttatcttctgaagggttttaaagaatggccaattagctgagaagaattatctaatcaattagtgatgtctgccatggatgcagtagaggaaagtggtggtacaagtgccatgattgattagcaatgtctgcactggatacggaaaaaagaaggtgcttgcaggtttacagtgtatatgtgggctattgaagagccctctgagctcggttgctagcaggagagcatgcccatattggcttactttgtctgccacagacacagacagagggagttgggacatgcatgctatggggaccctcttgttggacacctaattggatgcctcttcatgagaggcctccttttcttcaccttttatgctgcactcctcccctagtttacacatcttgatgctgtggctcagtttgccttcctgaatttttattgggtccctgttttctctcctaacatgctgagattctgcatccccacagcctaaactgagccagtggccaaacaaccgtgctcagcctgtttctctctgccctctagagcaaggcccaccaggtccatccaggaggctctcctgacctcaagtccaacaacagtgtccacactagtcaaggttcagcccagaaaacagaaagcactctaggaatcttaggcagaaagggattttatctaaatcactggaaaggctggaggagcagaaggcagaggccaccactggactattggtttcaatattagaccactgtagccgaatcagaggccagagagcagccactgctactgctaatgccaccactacccctgccatcactgccccacatggacaaaactggagtcgagacctaggttagattcctgcaaccacaaacatccatcagggatggccagctgccagagctgcgggaagacggatcccacctccctttcttagcagaatctaaattacagccagacctctggctgcagaggagtctgagacatgtatgattgaatgggtgccaagtgccagggggcggagtccccagcagatgcatcctggccatctgttgcgtggatgagggagtgggtctatctcagaggaaggaacaggaaacaaagaaaggaagccactgaacatcccttctctgctccacaggagtgccttagacagcctgactctccacaaaccactgttaaaacttacctgctaggaatgctagattgaatgggatgggaagagccttccctcattattgtcattcttggagagaggtgagcaaccaagggaagctcctctgattcacctagaacctgttctctgccgtctttggctcagcctacagagactagagtaggtgaagggacagaggacagggcttctaatacctgtgccatattgacagcctccatccctgtcccccatcttggtgctgaaccaacgctaagggcaccttcttagactcacctcatcgatactgcctggtaatccaaagctagaactctcaggaccccaaactccacctcttggattggccctggctgctgccacacacatatccaagagctcagggccagttctggtgggcagcagagacctgctctgccaagttgtccagcagcagagtggccctggcctgggcatcacaagccagtgatgctcctgggaagaccaggtggcaggtcgcagttgggtaccttccattcccaccacacagactctgggcctccccgcaaaatggctccagaattagagtaattatgagatggtgggaaccagagcaactcaggtgcatgatacaaggagaggttgtcatctgggtagggcagagaggagggcttgctcatctgaacaggggtgtatttcattccaggccctcagtctttggcaatggccaccctggtgttggcatattggccccactgtaacttttgggggcttcccggtctagccacaccctcggatggaaagacttgactgcataaagatgtcagttctccctgagttgattgataggcttaatggtcaccctaaaaacacccacatatgcttttcgatggaaccaggtaagttgacgctaaagttcttatggaaaaatacacacgcaatagctaggaaaacacagggaaagaagagttctgagcagggcctagtcttagccaatattaaaacatactatgaagcctctgatacttaaacagcatggcgctggtacgtaaatagaccaatgcagttaggtggctctttccaagactctggggaaaaaagtagtaaaaagctaaatgcaatcaatcagcaattgaaagctaagtgagagagccagagggcctccttggtggtaaaagagggttgcatttcttgcagccagaaggcagagaaagtgaagaccaagtccagaactgaatcctaagaaatgcaggactgcaaagaaattggtgtgtgtgtgtgtgtgtgtgtgtgtgtgtgtgtttaatttttaaaaagtttttattgagatacaagtcaataccataaagctctcacccttctaaagtgtacaattcagtggtgtgagtatattcataagatttatacttggtgtctattcataagacttatatccagcatattcataactagagccatatcacagatgcattcatcataataattccagacattttcatcaccctaaaaggaaaccctgaaacccattagcagtcattccccattcctccaacccattctctccctaatccctagaaaccaccaatctgctgtgtatttcatctattgccaacatttcatataaatggcatcatacaata

SEQ ID NO: 115 - DNA, 1695 bp, Homo Sapiens
tgactagacggccagcctgttaaggtggccccagatattccagcctcagcccagagtcctcctgtgcccctactgcagcaagggtgtctccaagaagggggacctggagtcagcccgtcacacctggtttcctctctgctagggtccctcctcccacagagcactggagggcagctgaggaggagctaccttaaaaaaggaggtgtgtgccagggagctgggtaggagcctggctatatatctgcccagcagcggtactctcgggacagagatggcactgatgcaggaactgtatagcacaccagcctccaggctggactccttcgtggctcagtggctgcagccccaccgggagtggaaggaagaggtgctagacgctgtgcggaccgtggaggagtttctgaggcaggagcatttccaggggaagcgtgggctggaccaggatgtgcgggtgctgaaggtagtcaaggtgggctccttcgggaatggcacggttctcaggagcaccagagaggtggagctggtggcgtttctgagctgtttccacagcttccaggaggcagccaagcatcacaaagatgttctgaggctgatatggaaaaccatgtggcaaagccaggacctgctggacctcgggctcgaggacctgaggatggagcagagagtccccgatgctctcgtcttcaccatccagaccagggggactgcggagcccatcacggtcaccattgtgcctgcctacagagccctggggccttctcttcccaactcccagccaccccctgaggtctatgtgagcctgatcaaggcctgcggtggtcctggaaatttctgcccatccttcagcgagctgcagagaaatttcgtgaaacatcggccaactaagctgaagagcctcctgcgcctggtgaaacactggtaccagcagagggcacgagacatccacttgacagtggagcagaggggttacccagatttcaacctcatcgtgaacccttatgagcccataaggaaggttaaagagaaaatccggaggaccaggggctactctggcctgcagcgtctgtccttccaggttcctggcagtgagaggcagcttctcagcagcaggtgctccttagccaaatatgggatcttctcccacactcacatctatctgctggagaccatcccctccgagatccaggtcttcgtgaagaatcctgatggtgggagctacgcctatgccatcaaccccaacagcttcatcctgggtctgaagcagcagattgaagaccagcaggggcttcctaaaaagcagcagcagctggaattccaaggccaagtcctgcaggactggttgggtctggggatctatggcatccaagacagtgacactctcatcctctcgaagaagaaaggagaggctctgtttccagccagttagttttctctgggagacttctctgtacatttctgccatgtactccagaactcatcctgtcaatcactctgtcccattgtctactgggaaggtcccaggtcttcaccagttttacaatgagttatcccaggccagacgtggtagctcacacctgtaatcccagaactttgggaggccgaggtgggaggagcgcttgagccgaggagttcaagaccagcctgggtatcacagggagaccccgtctctacaaaataaaaaaataattcactggg

SEQ ID NO: 116 - DNA, 3133 bp, Homo Sapiens
aatcatgcaggaaactagatactgagaaaacagttgtagctcagcgtggctacaagtaactgtggtgtggaagcagagtagagagaaaacttgttcctcattagagagagagccacacttctcactgctcacaatgagaggccaaagattacccttggacatccagattttctattgtgccagacctgacgaagagccttttgtgaagatcatcactgttgaagaggcaaagcgcaggaagagcacatgcagctactatgaagacgaggacgaagaggtgctgcctgtcctacggccccacagcgcgctcctggagaatatgcacatcgagcagctggcccgacgccttcctgcaagggtgcaagggtatccatggagactggcctatagcacgttagagcacgggaccagcttaaagacgctctaccggaaatcggcatcactagacagtcctgtcctattggtcatcaaagatatggataatcagatttttggagcatatgcaactcatcctttcaagttcagtgaccactattatggcacaggcgaaacttttctctacacattcagccctcattttaaggtctttaagtggagtggagaaaattcatactttatcaatggagacataagttctttagaacttggtggtggagggggacgatttggtttatggctagatgctgatttataccacggacgaagcaactcttgcagcactttcaataatgatattctttccaaaaaggaagacttcatagttcaggatctggaggtgtgggcatttgattgaaattcagactgccttaaaatataacattaaaaagactgggttcgatcagccctcctaaagctggctggaaaaagaagccccagcccagcctgcctcatcccaccccaatgcttcctttctgccatcatctcagagcatgatcacattgcagaaagattctggaaggtccatgtagagggcagacattgaagaaagaaacttaaaatccaggttgttgaaaagactttgtactcccacttcctccaaatccatacagtgaggaatcagagtgtttatagatatatgagttgaatgcaatttttatttttggtaactgtgaaaaataagatactgtggatatatacatgccttgtgtatttatcagcataattttcattaccaaaatgtacagctattatttgccatggaaaaggttagtctcatttagaaaaatcgaaagtgcacagcacttaaagggaatatatgaggtttttttttttttaaaaaaaaacttttatttattatttgtagtatattgtctgaaatgtgtcggcagttttttttcttttaatgtgtcaaatcttgaaatattaaatgtatacattttgtgctatgttttgggaacaaatctgtttgatttatatagttttatattgaattttttttgccctgattgtttagggtgataggtcttaagcagcatatatctatatatctgtatgtgggtatatagagatatatgtgtgtgtgtatgtatatgtacatatacatatatatgagtgtataattctaaatttctaaaaactcattatgaatgttcatcaatttgactattataggccagctttccatttagtcaataaaagcgtacatttttagttacttaccttgaacatattcgtgtgaaaaagaatacatcatttctcacagtcttaagttgatatttatagaaatgaatacctttgtgaacctagacttagaacaaatcctgcttttgaaaaaaaatgttttgcttcttacaaaatcatttgtgttaataacaaaaactttattttcggagtgttctttgtataacttttccaagcttttacattaacgagcaggcctctgtcttaaaagggactcagtatattaatttctgcattttttaaatcaaatgaaaaacgtcaaattggaccaattgtcttggtttcttgattcatttatttgagaaaaaaacaatacaaagaaatgcattcatatcaaaattggaatagaaaggaaaacctatttttaagatatcaacctattttcacatcataaaacatctattacataaaataaaggtccaggcatagtggctcttgcctgtaatcccagcactttgggaggccgaggcaggtggatcactcaaggtcacaagtttgagaccagtctggccaacatggtgaaaccccatctctactaaaagtacaaatattagccgactatgtggcgggcacctgtaatcccacctactcgggaggctgaggcaggagaattgcttgaatccgggaagcagaggttgtagtgagccaagatcgtgccactgcactctatcctgggtaacagcgagactctgtcttaaaaataataacaataataataataataaagacttacttaaccaatattattgattaccagacttttatgaaagccaaagactgcttgctagtaggaaaaaatttcaaataataaccaaagctgaaaaatggtctgtcataaattatttccccggtaatttttgaaaggaaaaatgtataacaagtactatttacatatctgcatttaaaaaagcaattcttagaatacttcctttacattattctcctattttagacattttgtgaaagagaacaaattgtccagtggcctcctgtcagatcaacaattattatactccttaattccatgcaaatttaaatgaatgctataaaattttaaatctgtagcctgggtgtacgtttcactcaagttctcctactgaggactcttgactaacagcatactggcagtttcaccttaacctgctcgttaaataatgtgttggtgtgagatatcaggaatgtctcatgatatcacgtttaccatttacaccatctgcaaccatatgctattaataaaatggaaaaaaacaaaatggtcattttgcatatacttcactctgacctagtttagtccatgatactataattgtgagagcatatccagatgctgtgttctctatgtaaaacagtattgtccattcagaaatgtgtgacccttcatttatggatattgactatatgtaatgcagtgctatcccaatattttcaataaaggactttatgcattcagtga

SEQ ID NO: 117 - DNA, 867 bp, Homo Sapiens
ctacccgcagtatcacttacagggatggatgacatcccagggctgctgccacccccacctgtggggagacaccagactgggggtggtgtggagatactcttagagaagaggctgctgggccacgggctcggcatggcagggcagtggctagcccggaagcaggagatcattaagaccacggagcagctcatcgaggccgtcaacaacggtgactttgaggcctacgcgaaaatctgtgacccagggctgacctcgtttgagcctgaagcactgggcaacctggttgaagggatggacttccacagattctacttcgagaacctgctggccaagaacagcaagccgatccacacgaccatcctgaacccacacgtgcacgtcattggagaggatgccgcctgcatcgcttacatccggctcacgcagtacattgacgggcagggccggccccgcaccagccagtctgaggagacccgcgtgtggcaccgccgcgacggcaagtggcagaacgtgcacttccactgctcgggcgcgcctgtggccccgctgcagtgaagagctgcgccctggtttcgccggacagagttggtgtttggagcccgactgccctcgggcacacggcctgcctgtcgcatgtttgtgtctgcctcgttccctcccctggtgcctgtgtctgcagaaaaacaagaccagatgtgatttgttaaaaaaaaacaaaaaaaaaaaaaaaaaaaacaagatgacgacgacaaccacaaaaaaaattgacatcagatgaaatgaaaaaaaaaaaaaacaaaaaaaactaaaggaaggaaaaagctgtaaaaatcactggcattcgtggggccactccccacccaagct

SEQ ID NO: 118 - DNA, 4423 bp, Homo Sapiens
agtctgcctgttttcgactcgcgctccggctgctgtcacttggctctctggctggagcttgaggacgcaaggagggtttgtcactggcagactcgagactgtaggcactgccatggcccctgtgctcagtaaggactcggcggacatcgagagtatcctggctttaaatcctcgaacacaaactcatgcaactctgtgttccacttcggccaagaaattagacaagaaacattggaaaagaaatcctgataagaactgctttaattgtgagaagctggagaataattttgatgacatcaagcacacgactcttggtgagcgaggagctctccgagaagcaatgagatgcctgaaatgtgcagatgccccgtgtcagaagagctgtccaactaatcttgatattaaatcattcatcacaagtattgcaaacaagaactattatggagctgctaagatgatattttctgacaacccacttggtctgacttgtggaatggtatgtccaacctctgatctttgtgtaggtggatgcaatttatatgccactgaagagggacccattaatattggtggattgcagcaatttgctactgaggtattcaaagcaatgagtatcccacagatcagaaatccttcgctgcctcccccagaaaaaatgtctgaagcctattctgcaaagattgctctttttggtgctgggcctgcaagtataagttgtgcttcctttttggctcgattggggtactctgacatcactatatttgaaaaacaagaatatgttggtggtttaagtacttctgaaattcctcagttccggctgccgtatgatgtagtgaattttgagattgagctaatgaaggaccttggtgtaaagataatttgcggtaaaagcctttcagtgaatgaaatgactcttagcactttgaaagaaaaaggctacaaagctgctttcattggaataggtttgccagaacccaataaagatgccatcttccaaggcctgacgcaggaccaggggttttatacatccaaagactttttgccacttgtagccaaaggcagtaaagcaggaatgtgcgcctgtcactctccattgccatcgatacggggagtcgtgattgtacttggagctggagacactgcctttgactgtgcaacatctgctctacgttgtggagctcgccgtgtgttcatcgtcttcagaaaaggctttgttaatataagagctgtccctgaggagatggaacttgctaaggaagaaaagtgtgaatttctgccattcctgtccccacggaaggttatagtaaaaggtgggagaattgttgctatgcagtttgttcggacagagcaagatgaaactggaaaatggaatgaagatgaagatcagatggtccatctgaaagccgatgtggtcatcagtgcctttggttcagttctgagtgatcctaaagtaaaagaagccttgagccctataaaatttaacagatggggtctcccagaagtagatccagaaactatgcaaactagtgaagcatgggtatttgcaggtggtgatgtcgttggtttggctaacactacagtggaatcggtgaatgatggaaagcaagcttcttggtacattcacaaatacgtacagtcacaatatggagcttccgtttctgccaagcctgaactacccctcttttacactcctattgatctggtggacattagtgtagaaatggccggattgaagtttataaatccttttggtcttgctagcgcaactccagccaccagcacatcaatgattcgaagagcttttgaagctggatggggttttgccctcaccaaaactttctctcttgataaggacattgtgacaaatgtttcccccagaatcatccggggaaccacctctggccccatgtatggccctggacaaagctcctttctgaatattgagctcatcagtgagaaaacggctgcatattggtgtcaaagtgtcactgaactaaaggctgactttccagacaacattgtgattgctagcattatgtgcagttacaataaaaatgactggacggaacttgccaagaagtctgaggattctggagcagatgccctggagttaaatttatcatgtccacatggcatgggagaaagaggaatgggcctggcctgtgggcaggatccagagctggtgcggaacatctgccgctgggttaggcaagctgttcagattcctttttttgccaagctgaccccaaatgtcactgatattgtgagcatcgcaagagctgcaaaggaaggtggtgccaatggcgttacagccaccaacactgtctcaggtctgatgggattaaaatctgatggcacaccttggccagcagtggggattgcaaagcgaactacatatggaggagtgtctgggacagcaatcagacctattgctttgagagctgtgacctccattgctcgtgctctgcctggatttcccattttggctactggtggaattgactctgctgaaagtggtcttcagtttctccatagtggtgcttccgtcctccaggtatgcagtgccattcagaatcaggatttcactgtgatcgaagactactgcactggcctcaaagccctgctttatctgaaaagcattgaagaactacaagactgggatggacagagtccagctactgtgagtcaccagaaagggaaaccagttccacgtatagctgaactcatggacaagaaactgccaagttttggaccttatctggaacagcgcaagaaaatcatagcagaaaacaagattagactgaaagaacaaaatgtagctttttcaccacttaagagaaactgttttatccccaaaaggcctattcctaccatcaaggatgtaataggaaaagcactgcagtaccttggaacatttggtgaattgagcaacgtagagcaagttgtggctatgattgatgaagaaatgtgtatcaactgtggtaaatgctacatgacctgtaatgattctggctaccaggctatacagtttgatccagaaacccacctgcccaccataaccgacacttgtacaggctgtactctgtgtctcagtgtttgccctattgtcgactgcatcaaaatggtttccaggacaacaccttatgaaccaaagagaggcgtacccttatctgtgaatccggtgtgttaaggtgatttgtgaaacagttgctgtgaactttcatgtcacctacatatgctgatcttttaaaatcatgatccttgtgttcagctctttccaaattaaaacaaatatacattttctaaataaaaatatgtaatttcaaaatacatttgtaagtgtaaaaaatgtctcatgtcaatgaccattcaattagtggtcataaaatagaataattcttttctgaggatagtagttaaataactgtgtggcagttaattggatgttcactgccagttgtcttatgtgaaaaattaacttttttgtggcaattagtgtgacagtttccaaattgccctatgctgtgctccatatttgatttctaattgtaagtgaaattaagcattttgaaacaaagtactctttaacatacaagaaaatgtatccaaggaaacattttatcattaaaaattacctttaattttaatgctgtttctaagaaaatgtagttagctccataaagtacaaatgaagaaagtcaaaaaattatttgctatggcaggataagaaagcctaaaattgagtttgtagaactttattaagtaaaatccccttcgctgaaattgcttatttttggtgttggatagaggatagggagaatatttactaactaaataccattcactactcatgcgtgagatgggtgtacaaactcatcctcttttaatggcatttctctttaaactatgttcctaacaaaatgagatgataggatagatcctggttaccactcttttgctgtgcacatacgggctctgactggttttaatagtcaccttcatgattatagcaactaatgtttgaacaaagctcaaagtatgcaatgcttcattattcaagaatgaaaaatataatgttgataatatatattaagtgtgccaaatcagtttgactactctctgttttagtgtttatgtttaaaagaaatatattttttgttattattagataatatttttgtatttctctattttcataatcagtaaatagtgtcatataaactcatttatctcctcttcatggcatcttcaatatgaatctataagtagtaaatcagaaagtaacaatctatggcttatttctatgacaaattcaagagctagaaaaataaaatgtttcattatgcacttttagaaatgcatatttgccacaaaacctgtattactgaataatatcaaataaaatatcataaagcattttaaa

SEQ ID NO: 119 - DNA, 3858 bp, Homo Sapiens
acacatgacaccagtgcctttgtttcattgggctgggctctctggaaggtgtgctgctgcctgagctgctggaaaagcactgacaggtgtttgctagaaaagcactcctggagcttgccaccagcttggacttctagggactttcctctcagccaggaaggattttgatattcatcagaaatacctccagaagattcaaggagctgtagaggtgaagtaagcctgtgaaggaccagcatgggaatcctatactctgagcccatctgccaagcagcctatcagaatgactttggacaagtgtggcggtgggtgaaagaagacagcagctatgccaacgttcaagatggctttaatggagacacgcccctgatctgtgcttgcaggcgagggcatgtgagaatcgtttccttccttttaagaagaaatgctaatgtcaacctcaaaaaccagaaagagagaacctgcttgcattatgctgtgaagaaaaaatttaccttcattgattatctactaattatcctcttaatgcctgttctgcttattgggtatttcctcatggtatcaaagacaaagcagaatgaggctcttgtacgaatgctacttgatgctggcgtcgaagttaatgctacagattgttatggctgtaccgcattacattatgcctgtgaaatgaaaaaccagtctcttatccctctgctcttggaagcccgtgcagaccccacaataaagaataagcatggtgagagctcactggatattgcacggagattaaaattttcccagattgaattaatgctaaggaaagcattgtaatccttgtgaccacaccgatggagatacagaaaaagttaacgactggattctatcttcattttagacttttggtctgtgggccatttaacctggatgccaccattttatggggataatgatgcttaccatggttaatgttttggaagagctttttatttatagcattgtttactcagtcaagttcaccatggccgtaatccttctaagggaaacactaaagttgttgtagtctccacttcagtcagaaactgatgtttcagctaggcacagtggtacatgcctgtaatcccagctacttgggaggctgaggtgggaggatcacttgaactcaggagtttgagagcagccagggcaacacagcgagaccctgtctcaaaaaaaaaaaaaaaaaaaaaagccctggtgttccaaactcagtctttcctgaagaagaggatctgagttatcttctgaaacagcgttctcccttcccagttgtatcactcttataaaaagactgtccagtctatgtcatgccctaggagacaaactgttcctcccagccccctttgagtattgagcagaagaatcaaattattaaatacgtatgtttgtacagaatggtatttgtgtatgtgtgtgggcttagagattcacaagtaaatattcctttggtgaaggaatttcaataaaaacatctatcaagtgtcagcggtgagtgtgtttacaccacagaaattggcaaattgacaaatcagagtttgtttttgtttttttgttttttactttccataaagttcgtttaccagcataccactagagatttcggtttacaaataaaagccatcttggtttgagcaagactatgcaactatgaaaatgttcgtttaaaaaaatcttcatgatccttttgtaaatacaaggtggttgccaagcttgttagttttgtttattttattgatagatgtaaaatattattgtaacttatttggataaagttcttcaaaagaaacagagctatacaatgaggtaggatctggattatttgtctaagtgagagattgcgaatatcaaaatatctgtctcacttcttctgtgaatgacacagagtagaaataaattcactttaaaaatatgactgaattttgaaaatcaagactgaatctcacatagctgcagacaggaactaagccagcctctttgtatgtggtaacaagtacagtataagaatgaaagatttaccatccttgaaagctctaatgaaaatcaaatccagcaatatatattcaactgtgtacaggatttaagaaacttattttatgaaggaagtaatagtgtgtagatatagattctgaagtctttaaacgtgtcttaataaattaagattcactggcattgagctgagctaccaggtgacccttggggacaaaaaacccacacaagtgaatttcacacaccagtataccttcaacaatatacttttgacacacacaaacctttgatttggtttcagagattttgcaaaatagtaccaatgtaatttacaactgtcatctttgaaattgtgtaaaagtggaataattttctgaagaaataaatcatggtttgtcaatgagttgcagagactgtctgacattaactttgtcaagattaaaggataaagtatatgacaatttgtttcatcatgctcatgacattatgcaattttctccctagcttttaatttttggaggcagaaaattgagccagaaatttttagtcattaggtctcctagcaacaagctgtaaaccttccaacaagcttggactagaatctagacactgaaatgcacatacatgctttatgtaatgcagaatgcatttattggagaactcataaacatcctataaaattttcttccctgagatgcaactataaaacttggccttattctgagaatgcttaacatagatttcatccatactgtaacactgattttgttgttgttgtccttaaagcagctcagcttcctgaggtagtgttatgtctctgtggcaacaaggtgaaaatgtctagcttattttgtcaaagtcaacaataatccacagactccagacctcaatatctgtcccaatttgccattttactttagtgctccaaaaatatggcttatagaaaaaacaataggtgttttaaagagatttacctgaatgatatagagaatgtctagatattttctggctatcaggtaaaacctacccttcaagatggtagaatatataatagcatacaaaacctctatttacctaataagtactttaatttacagaaaaaaaatgtaaatgtaagtgtcggatttagtgccaagtgcagggaatctgaaaaatgtatactaggtctctgctctccgtaattctgccttcatgggtcctagccccatccctcaggaggttgtcctaagatcgtcagtgtcagatgcttcacaatacggcctcacaccgtccctgggaaaggttggtctcctcctgctgcatcagatggatgatttcattgtacatacggtgaggagcatccaaaccccagatgaaatccacgtgagcccattcaggaatattcttatggtagatgaggttggtcacctcagagagcagcattttcacgtcttctggatttgaaagccagtcctgacctcctgtccacattgctgtagggaccgtcatatctctgactctgtaccttacaggagttggctagagaaaaggaatagttcttaactctaggtaacatttggactttcaggctcataatttatgtttcaaatagacataataaacatgccatctgttgtggtgaagggtacatgggtgttagagccacacaactctgttaagaatttctgttcccgcccttactttaaggtaaaattacttaacattattgaacctcagtttcttcttctgtgactggggataatatctgtaataacttgctagatcaaatgacaaaacacataaaaacatgtaatgccttgtatttcttttttcttcctattaaatattttgtaaataaattgtttttaaaaataa

SEQ ID NO: 120 - DNA, 1572 bp, Homo Sapiens
ttttttcttgtcacgcaaacttcctgggcaggaactccaagggctcaatggacgggaagcagggtccttaaatacgtcccctcttggctcttgccgttccaggagccccagttaccgggagaggctgtgtcaaagaatgaatggaacgcctactatgaggaggtggtgtacgtcctagaggagatcgagtacatgatccagaagctccctgagtgggccgcggatgagcccgtggagaagacgccccagactcagcaggacgagctctacatccactcggagccactgggcgtggtcctcgtcattggcacctggaactaccccttcaacctcaccatccagcccatggtgggcgccatcgctgcagggaactcagtggtcctcaagccctcggagctgagtgagaacatggcgagcctgctggctaccatcatcccccagtacctggacaaggatctgtacccagtaatcaatgggggtgtccctgagaccacggagctgctcaaggagaggttcgaccatatcctgtacacgggcagcacgggggtggggaagatcatcatgacggctgctgccaagcacctgacccctgtcacgctggagctgggagggaagagtccctgctacgtggacaagaactgtgacctggacgtggcctgccgacgcatcgcctgggggaaattcatgaacagtggccagacctgcgtggcccctgactacatcctctgtgacccctcgatccagaaccaaattgtggagaagctcaagaagtcactgaaagagttctacggggaagatgctaagaaatcccgggactatggaagaatcattagtgcccggcacttccagagggtgatgggcctgattgagggccagaaggtggcttatgggggcaccggggatgccgccactcgctacatagcccccaccatcctcacggacgtggacccccagtccccggtgatgcaagaggagatcttcgggcctgtgctgcccatcgtgtgcgtgcgcagcctggaggaggccatccagttcatcaaccagcgtgagaagcccctggccctctacatgttctccagcaacgacaaggtgattaagaagatgattgcagagacatccagtggtggggtggcggccaacgatgtcatcgtccacatcaccttgcactctctgcccttcgggggcgtggggaacagcggcatgggatcctaccatggcaagaagagcttcgagactttctctcaccgccgctcttgcctggtgaggcctctgatgaatgatgaaggcctgaaggtcagataccccccgagcccggccaagatgacccagcactgaggaggggttgctccgcctggcctggccatactgtgtcccatcggagtgcggaccaccctcactggctctcctggccctgggagaatcgctcctgcagccccagcccagccccactcctctgctgacctgctgacctgtgcacaccccactcccacatgggcccaggcctcaccattccaagtctccacccctttctagaccaataaagagacgaatacaattttctaactcagcaaa

SEQ ID NO: 121 - DNA, 641 bp, Homo Sapiens
gacggcatgaccccgctgcacgccgcggcgcagatgggccacagcccagtcatcgtgtggttggacaaagacggcgccaccgccatgcacttcgcggcgagccgcggccacaccaaggtgctcagctggctgctgctgcacggcggggagatctcggctgacctgtggggcgggaccccgctgcacgacgccgccgagaacggggagctagagtgctgccagatcctggtagtgaacggcgcggagctggacgtccgcgaccgcgacgggtacacggccgccgacctgtcggacttcaacggccacagccactgcacccgctacctgcgcacggtggagaacctgagcgtggagcaccgcgtgctttcccgggatccatccgcagagctggaggctaagcagccggattcaggcatgtcctcacccaataccacggtgtcggtccagccgctgaactttgacctcagctcgcctaccagcaccctctccaactacgactcctgctcctccagccactccagcatcaagggccagcaccctccatgtgggctttccagcgctagagctgcagacatacagagctacatggacatgctgaacccggagctgggcctgcctcggggcacgattgggaagcccac

SEQ ID NO: 122 - DNA, 4135 bp, Homo Sapiens
gtgctttttagtggccgcgtcccaggatagctggaaggttaggacgctcttgcggtcccagagtggagtggaaggtctggagctttgggaggagacggggaggacagactggaggcgtgttcctccggagttttctttttcgtgcgagccctcgcgcgcgcgtacagtcatcccgctggtctgacgattgtggagaggcggtggagaggcttcatccatcccacccggtcgtcgccggggattggggtcccagcgagacctccccgggagaagcagtgcccaggaggttttctgaagccggggaagctgtgcagccgaagccgccgccgcgccggagcccgggacaccggccaccctccgcgccacccaccctcgccggctccggcttcctctggcccaggcgccgcgcggacccggcagctgtctgcgcacgccgagctccacggtgaaaaaaaagtgaaggtgtaaaagcagcacaagtgcaataagagatatttcctcaaatttgcctcaagatggaaaccctttgcctcagggcatccttttggctggcactggttggatgtgtaatcagtgataatcctgagagatacagcacaaatctaagcaatcatgtggatgatttcaccacttttcgtggcacagagctcagcttcctggttaccactcatcaacccactaatttggtcctacccagcaatggctcaatgcacaactattgcccacagcagactaaaattacttcagctttcaaatacattaacactgtgatatcttgtactattttcatcgtgggaatggtggggaatgcaactctgctcaggatcatttaccagaacaaatgtatgaggaatggccccaacgcgctgatagccagtcttgcccttggagaccttatctatgtggtcattgatctccctatcaatgtatttaagctgctggctgggcgctggccttttgatcacaatgactttggcgtatttctttgcaagctgttcccctttttgcagaagtcctcggtggggatcaccgtcctcaacctctgcgctcttagtgttgacaggtacagagcagttgcctcctggagtcgtgttcagggaattgggattcctttggtaactgccattgaaattgtctccatctggatcctgtcctttatcctggccattcctgaagcgattggcttcgtcatggtaccctttgaatataggggtgaacagcataaaacctgtatgctcaatgccacatcaaaattcatggagttctaccaagatgtaaaggactggtggctcttcgggttctatttctgtatgcccttggtgtgcactgcgatcttctacaccctcatgacttgtgagatgttgaacagaaggaatggcagcttgagaattgccctcagtgaacatcttaagcagcgtcgagaagtggcaaaaacagttttctgcttggttgtaatttttgctctttgctggttccctcttcatttaagccgtatattgaagaaaactgtgtataacgagatggacaagaaccgatgtgaattacttagtttcttactgctcatggattacatcggtattaacttggcaaccatgaattcatgtataaaccccatagctctgtattttgtgagcaagaaatttaaaaattgtttccagtcatgcctctgctgctgctgttaccagtccaaaagtctgatgacctcggtccccatgaacggaacaagcatccagtggaagaaccacgatcaaaacaaccacaacacagaccggagcagccataaggacagcatgaactgaccacccttagaagcactcctcggtactcccataatcctctcggagaaaaaaatcacaaggcaactgtgagtccgggaatctcttctctgatccttcttccttaattcactcccacacccaagaagaaatgctttccaaaaccgcaagggtagactggtttatccacccacaacatctacgaatcgtacttctttaattgatctaatttacatattctgcgtgttgtattcagcactaaaaaatggtgggagctgggggagaatgaagactgttaaatgaaaccagaaggatatttactacttttgcatgaaaatagagctttcaagtacatggctagcttttatggcagttctggtgaatgttcaatgggaactggtcaccatgaaactttagagattaacgacaagattttctactttttttaagtgatttttttgtccttcagccaaacacaatatgggctcaagtcacttttatttgaaatgtcatttggtgccagtattttttaactgcataatagcctaacatgattatttgaacttatttacacatagtttgaaaaaaaaaagacaaaaatagtattcaggtgagcaattagattagtattttccacgtcactgtttatttttttaaaacacaaattctaaagctacaacaaatactacaggcccttaaagcacagtctgatgacacatttggcagtttaatagatgttactcaaagaattttttaagaactgtattttattttttaaatggtgttttattacaagggaccttgaacatgttttgtatgttaaattcaaaagtaatgcttcaatcagatagttctttttcacaagttcaatctgtttttcatgtaaattttgtatgaaaaatcaatgtcaagtaccaaaatgttaatgtatgtgtcatttaactctgcctgagactttcagtgcactgtatatagaagtctaaaacacacctaagagaaaaagatcgaatttttcagatgattcagaaattttcattcaggtatttgtaatagtgacatatatatgtatatacatatcacctcctattctcttaatttttcttaaaatgttaactggcagtaagtcttttttgatcattcccttttccatataggaaacataattttgaagtggccagatgagtttatcatgtcagtgaaaaataattacccacaaatgccaccagaacttacgattcttcacttcttggggttttcagtatgaacctaactccccaccccaacatctccctcccacattgtcaccatttcaaagggcccacagtgacttttgctgggcattttcccagatgtttacagactgtgagtacagcagaaaatcttttactagtgtgtgtgtgtatatatataaacaattgtaaatttcttttagcccatttttctagactgtctctgtggaatatatttgtgtgtgtgatatatgcatgtgtgtgatggtatgtatggatttaatctaatctaataattgtgccccgcagttgtgccaaagtgcatagtctgagtaaaatctaggtgattgttcatcatgacaacctgcctcagtccattttaacctgtagcaaccttctgcattcataaatcttgtaatcatgttaccattacaaatgggatataagaggcagcgtgaaagcagatgagctgtggactagcaatatagggttttgtttggttggttggtttgataaagcagtatttggggtcatattgtttcctgtgctggagcaaaagtcattacactttgaagtattatattgttcttatcctcaattcaatgtggtgatgaaattgccaggttgtctgatatttctttcagacttcgccagacagattgctgataataaattaggtaagataatttgttgggccatattttaggacaggtaaaataacatcaggttccagttgcttgaattgcaaggctaagaagtactgcccttttgtgtgttagcagtcaaatctattattccactggcgcatcatatgcagtgatatatgcctataatataagccataggttcacaccattttgtttagacaattgtctttttttcaagatgctttgtttctttcatatgaaaaaaatgcattttataaattcagaaagtcatagatttctgaaggcgtcaacgtgcattttatttatggactggtaagtaactgtggtttactagcaggaatatttccaatttctacctttactacatcttttcaacaagtaactttgtagaaatgagccagaagccaaggccctgagttggcagtggcccataagtgtaaaataaaagtttacagaaaccttg

SEQ ID NO: 123 - DNA, 3217 bp, Homo Sapiens
ggcgctgtggcaggaagccaccccctcggtcggccggtgcgcggggctgttgcgccatccgctccggctttcgtaaccgcaccctgggacggcccagagacgctccagcgcgagttcctcaaatgttttcctgcgttgccaggaccgtccgccgctctgagtcatgtgcgagtgggaagtcgcactgacactgagccgggccagagggagaggagccgagcgcggcgcggggccgagggactcgcagtgtgtgtagagagccgggctcctgcggatgggggctgcccccggggcctgagcccgcctgcccgcccaccgccccgccccgcccctgccacccctgccgcccggttcccattagcctgtccgcctctgcgggaccatggagtggtagccgaggaggaagcatgctggccgtcggctgcgcgctgctggctgccctgctggccgcgccgggagcggcgctggccccaaggcgctgccctgcgcaggaggtggcgagaggcgtgctgaccagtctgccaggagacagcgtgactctgacctgcccgggggtagagccggaagacaatgccactgttcactgggtgctcaggaagccggctgcaggctcccaccccagcagatgggctggcatgggaaggaggctgctgctgaggtcggtgcagctccacgactctggaaactattcatgctaccgggccggccgcccagctgggactgtgcacttgctggtggatgttccccccgaggagccccagctctcctgcttccggaagagccccctcagcaatgttgtttgtgagtggggtcctcggagcaccccatccctgacgacaaaggctgtgctcttggtgaggaagtttcagaacagtccggccgaagacttccaggagccgtgccagtattcccaggagtcccagaagttctcctgccagttagcagtcccggagggagacagctctttctacatagtgtccatgtgcgtcgccagtagtgtcgggagcaagttcagcaaaactcaaacctttcagggttgtggaatcttgcagcctgatccgcctgccaacatcacagtcactgccgtggccagaaacccccgctggctcagtgtcacctggcaagacccccactcctggaactcatctttctacagactacggtttgagctcagatatcgggctgaacggtcaaagacattcacaacatggatggtcaaggacctccagcatcactgtgtcatccacgacgcctggagcggcctgaggcacgtggtgcagcttcgtgcccaggaggagttcgggcaaggcgagtggagcgagtggagcccggaggccatgggcacgccttggacagaatccaggagtcctccagctgagaacgaggtgtccacccccatgcaggcacttactactaataaagacgatgataatattctcttcagagattctgcaaatgcgacaagcctcccaggttcaagaagacgtggaagctgcgggctctgaaggaaggcaagacaagcatgcatccgccgtactctttggggcagctggtcccggagaggcctcgacccaccccagtgcttgttcctctcatctccccaccggtgtcccccagcagcctggggtctgacaatacctcgagccacaaccgaccagatgccagggacccacggagcccttatgacatcagcaatacagactacttcttccccagatagctggctgggtggcaccagcagcctggaccctgtggatgataaaacacaaacgggctcagcaaaagatgcttctcactgccatgccagcttatctcaggggtgtgcggcctttggcttcacggaagagccttgcggaaggttctacgccaggggaaaatcagcctgctccagctgttcagctggttgaggtttcaaacctccctttccaaatgcccagcttaaaggggctagagtgaacttgggccactgtgaagagaaccatatcaagactctttggacactcacacggacactcaaaagctgggcaggttggtgggggcctcggtgtggagaagcggctggcagcccacccctcaacacctctgcacaagctgcaccctcaggcaggtgggatggatttccagccaaagcctcctccagccgccatgctcctggcccactgcatcgtttcatcttccaactcaaactcttaaaacccaagtgccttagcaaattctgtttttctaggcctggggacggcttttacttaaaccgccaaggctgggggaagaagctctctcctccctttcttccctacagttgaaaaacagctgagggtgagtgggtgaataatacagtatctcagggcctggtcgttttcaacagaattataattagttcctcattagcattttgctaaatgtgaatgatgatcctaggcatttgctgaatacagaggcaactgcattggctttgggttgcaggacctcaggtgagaagcagaggaaggagaggagaggggcacagggtctctaccatcccctgtagagtgggagctgagtgggggatcacagcctctgaaaaccaatgttctctcttctccacctcccacaaaggagagctagcagcagggagggcttctgccatttctgagatcaaaacggttttactgcagctttgtttgttgtcagctgaacctgggtaactagggaagataatattaaggaagacaatgtgaaaagaaaaatgagcctggcaagaatgtgtttaaacttggtttttaaaaaactgctgactgttttctcttgagagggtggaatatccaatattcgctgtgtcagcatagaagtaacttacttaggtgtgggggaagcaccataactttgtttagcccaaaaccaagtcaagtgaaaaaggaggaagagaaaaaatattttcctgccaggcatggtggcccacgcacttcgggaggtcgaggcaggaggatcacttgagtccagaagtttgagatcagcctgggcaatgtgataaaaccccatctctacaaaaagcataaaaattagccaagtgtggtagagtgtgcctgaagtcccagatacttggggggctgaggtgggaggatctcttgagcctgggaggtcaaggctgcagtgagccgagattgcaccactgcactccagcctgggtgacagagcaagtgagaccctgtctcaaaaaaagaaaaagaaaaagaaaaaa

SEQ ID NO: 124 - DNA, 982 bp, Homo Sapiens
acagcccaccagtgaccacgaaggctgtgctgcttgccctgttgatggcaggcttggccctgcagccaggcactgccctgctgtgctactcctgcaaagcccaggtgagcaacgaggactgcctgcaggtggagaactgcacccagctgggggagcagtgctggaccgcgcgcatccgcgcagttggcctcctgaccgtcatcagcaaaggctgcagcttgaactgcgtggatgactcacaggactactacgtgggcaagaagaacatcacgtgctgtgacaccgacttgtgcaacgccagcggggcccatgccctgcagccggctgctgccatccttgcgctgctccctgcactcggcctgctgctctggggacccggccagctctaggctctggggggccccgctgcagcccacactgggtgtggtgccccaggcctctgtgccactcctcacacacccggcccagtgggagcctgtcctggttcctgaggcacatcctaacgcaagtctgaccatgtatgtctgcgcccctgtcccccaccctgaccctcccatggccctctccaggactcccacccggcagatcggctctattgacacagatccgcctgcagatggcccctccaaccctctctgctgctgtttccatggcccagcattctccacccttaaccctgtgctcaggcacctcttcccccaggaagccttccctgcccaccccatctatgacttgagccaggtctggtccgtggtgtcccccgcacccagcaggggacaggcactcaggagggcccggtaaaggctgagatgaagtggactgagtagaactggaggacaggagtcgacgtgagttcctgggagtctccagagatggggcctggaggcctggaggaaggggccaggcctcacattcgtggggctccctgaatggcagcctcagcacagcgtaggcccttaataaacacctgttggataagcca

SEQ ID NO: 125 - DNA, 1831 bp, Homo Sapiens
aaaagtgcctttgttggcctgggctcaggaatccagagaaactggtcaggaggaggccccagtgacaaaaacccctccctctgcccccgcccctctgccagagccatataactgctcaacctgtccccgagagagagtgccctggcagctgtcggctggaaggaactggtctgctcacacttgctggcttgcgcatcaggactggctttatctcctgactcacggtgcaaaggtgcactctgcgaacgttaagtccgtccccagcgcttggaatcctacggcccccacagccggatcccctcagccttccaggtcctcaactcccgtggacgctgaacaatggcctccatggggctacaggtaatgggcatcgcgctggccgtcctgggctggctggccgtcatgctgtgctgcgcgctgcccatgtggcgcgtgacggccttcatcggcagcaacattgtcacctcgcagaccatctgggagggcctatggatgaactgcgtggtgcagagcaccggccagatgcagtgcaaggtgtacgactcgctgctggcactgccgcaggacctgcaggcggcccgcgccctcgtcatcatcagcatcatcgtggctgctctgggcgtgctgctgtccgtggtggggggcaagtgtaccaactgcctggaggatgaaagcgccaaggccaagaccatgatcgtggcgggcgtggtgttcctgttggccggccttatggtgatagtgccggtgtcctggacggcccacaacatcatccaagacttctacaatccgctggtggcctccgggcagaagcgggagatgggtgcctcgctctacgtcggctgggccgcctccggcctgctgctccttggcggggggctgctttgctgcaactgtccaccccgcacagacaagccttactccgccaagtattctgctgcccgctctgctgctgccagcaactacgtgtaaggtgccacggctccactctgttcctctctgctttgttcttccctggactgagctcagcgcaggctgtgaccccaggagggccctgccacgggccactggctgctggggactggggactgggcagagactgagccaggcaggaaggcagcagccttcagcctctctggcccactcggacaacttcccaaggccgcctcctgctagcaagaacagagtccaccctcctctggatattggggagggacggaagtgacagggtgtggtggtggagtggggagctggcttctgctggccaggatagcttaaccctgactttgggatctgcctgcatcggcgttggccactgtccccatttacattttccccactctgtctgcctgcatctcctctgttccgggtaggccttgatatcacctctgggactgtgccttgctcaccgaaacccgcgcccaggagtatggctgaggccttgcccacccacctgcctgggaagtgcagagtggatggacgggtttagaggggaggggcgaaggtgctgtaaacaggtttgggcagtggtgggggagggggccagagaggcggctcaggttgcccagctctgtggcctcaggactctctgcctcacccgcttcagcccagggcccctggagactgatcccctctgagtcctctgccccttccaaggacactaatgagcctgggagggtggcagggaggaggggacagcttcacccttggaagtcctggggtttttcctcttccttctttgtggtttctgttttgtaatttaagaagagctattcatcactgtaattattattattttctacaataaatgggacctgtgcacaggaggaaattt

SEQ ID NO: 126 - DNA, 692 bp, Homo Sapiens
agtgcgcgcctagcagtgtcccagccgggttcgtgtcgccatggggcagatcgagtgggccatgtgggccaacgaacaggcgctggcgtccggcctgatcctcatcaccgggggcatcgtggccacagctgggcgcttcacccagtggtactttggtgcctactccattgtggcgggcgtgtttgtgtgcctgctggagtacccccgggggaagaggaagaagggctccaccatggagcgctggggacagaagtacatgaccgccgtggtgaagctgttcgggccctttaccaggaattactatgttcgggccgtcctgcatctcctgctctcggtgcccgccggcttcctgctggccaccatccttgggaccgcctgcctggccattgcgagcggcatctacctactggcggctgtgcgtggcgagcagtggacgcccatcgagcccaagccccgggagcggccgcagatcggaggcaccatcaagcagccgcccagcaaccccccgccgcggcccccggccgaggcccgcaagaagcccagcgaggaggaggctgcggtggcggcggggggacccccgggaggtccccaggtcaaccccatcccggtgaccgacgaggtcgtgtgacctcgccccggacctgccctcccgccaggtgcacccacctgcaataaatgcagcgaagccggga

SEQ ID NO: 127 - DNA, 1041 bp, Homo Sapiens
attctgctgagaccatcaagccctcatccactcctactcatctcatctgtctgagtccattggggggcctcaccggcattccctgttgtctgtttggctggggaggggagtgtctggcagcctcagcgggaaagatgagggagcaatctgatcaagacggatctaacttggcaagatgagcactctgcccctttctcctgggaaacaaagagtcagatggagttcagtatctccgccctatccatccaggagccgagcaacggcaccgccgccagcgagcccagaccactgtccaaagcttcccagggctcccaggccctcaagtcctcccaaggcagcaggtcctccagcctggacgccctgggccccaccaggaaggaggaggaagcgtcattctggaagatcaatgctgagcggtcccgaggggaggggcctgaggccgagttccagtcgctgacccctagccagatcaagtccatggagaagggggaaaaggtcttgcctccctgctaccggcaggaacctgccccgaaggacagggaggccaaggtggaaaggcccagcaccctccgtcaggagcagcgtcctcttcccaacgtgagcaccgaacgtgagagaccccagcctgtccaggccttcagcagtgcactgcacgaggctgccccctcccagctcgaggggaagctgccatctcctgatgtcaggcaggacgatggggaagacaccctgttctcggaacccaagtttgcacaggtcagctcaagtaatgtcgtcttgaagacgggatttgattttctggacaattggtaaaatgtattagaaaaatacaatgaagaaccctaaaatgttttccaaagtggtgtggtggaggaggataaaaagggccaccttttcctatgtattttactggtttcttgacactcttttcttaatcatttggaaactggtcaatattgccagatttttttcttttttggtagaaccagatatatatgctattttcagtgatttgataacagaagttttccatttggaattttt

SEQ ID NO: 128 - DNA, 1099 bp, Homo Sapiens
tccagaatgaagttcagagaaacaaaggaatgaatgataacatgacaacatagaagggagagtaagagagtagatagcatgggaaggtccaacccatatccagttggagtctgagaaaagtgaaaagagagaatgggggagaagcaatatttgaagacataatagatatttggatttgacctgcattttggaatttatctacacttaaaatgccaccagcagttggaggtccagttggatacacccccccagatggaggctggggctgggcagtggtaattggagctttcatttccatcggcttctcttatgcatttcccaaatcaattactgtcttcttcaaagagattgaaggtatattccatgccaccaccagcgaagtgtcatggatatcctccataatgttggctgtcatgtatggtggaggtcctatcagcagtatcctggtgaataaatatggaagtcgtatagtcatgattgttggtggctgcttgtcaggctgtggcttgattgcagcttctttctgtaacaccgtacagcaactatacgtctgtattggagtcattggaggtcttgggcttgccttcaacttgaatccagctctgaccatgattggcaagtatttctacaagaggcgaccattggccaacggactggccatggcaggcagccctgtgttcctctgtactctggcccccctcaatcaggttttcttcggtatctttggatggagaggaagctttctaattcttgggggcttgctactaaactgctgtgttgctggagccctcatgcgaccaatcgggcccaagccaaccaaggcagggaaagataagtctaaagcatcccttgagaaagctggaaaatctggtgtgaaaaaagatctgcatgatgcaaatacagatcttattggaagacaccctaaacaagagaaacgatcagtcttccaaacaattaatcagttcctggacttaaccctattcacccacagaggctttttgctatacctctctggaaatgtgatcatgttttttggactctttgcacctttggtgtttcttagtagttatgggaagagtcagcattattctagtgagaa

SEQ ID NO: 129 - DNA, 537 bp, Homo Sapiens
ctcttttcctccttggctgtctgaagatagatcgccatcatgaacgacaccgtaactatccgcactagaaagttcatgaccaaccgactacttcagaggaaacaaatggtcattgatgtccttcaccccgggaaggcgacagtgcctaagacagaaattcgggaaaaactagccaaaatgtacaagaccacaccggatgtcatctttgtatttggattcagaactcattttggtggtggcaagacaactggctttggcatgatttatgattccctggattatgcaaagaaaaatgaacccaaacatagacttgcaagacatggcctgtatgagaagaaaaagacctcaagaaagcaacgaaaggaacgcaagaacagaatgaagaaagtcagggggactgcaaaggccaatgttggtgctggcaaaaagaagtgagctggagattggatcacagccgaaggagtaaaggtgctgcaatgatgttagctgtggccactgtggatttttcgcaagaacattaataaactaaaaacttca

SEQ ID NO: 130 - DNA, 8407 bp, Homo Sapiens
agtgctggaggtgactggagccgcggcgacggcggcagcagctgcggtggcggcgctctcagccgtggcagccgaggctgcagcccggcccagggcggctcagcggacaataaccgggctaggaacctgaccgggctggaccccactgtgatgcttcctgactgataatgttataacagtgcctggaagcctgaggctgcatttccagctggacgtacctcagttgtccccatcatcatggagacccaaaaggatgaagctgctcaggccaagggagctgcagcctctgggagtacccgtgaacaaacagcagaaaaaggagccaagaacaaggcagctgaggcgacagaaggaccaacctcagagccatcctcatccggcccaggtaggctgaagaaaactgccatgaaactctttggtggcaagaagggtatctgtactctgcctagtttctttggagggggacggagcaaaggttctgggaaaggcagctccaagaaaggtctcagcaagagcaagacccacgatggcctgagtgaagcagcccatggccctgaagatgttgtcagtgaaggaactggcttctccctgcctttgcctgagttaccctgccaatttcccagctctcagagtgcccatggggctttggagacaggctccagatgtaagacatctgtggctggagccacagagaaagctgtggctgagaagtttccctctatgcccaagccaaagaaaggcctaaaaggcttttttagcagtatccgccgtcaccggaagagcaaggtcactggggctgagcaaagtgagccaggggccaaggggcctgagagggtcagagccaggcctcatgagcacgtgagctcagcccctcaggtgccctgctttgaggagaccttccaagcccctagaaaggaaaatgctaacccccaagatgcccctgggccaaaagtttctccaacaccagaaccttctccaccagctactgagaaaatggcctgtaaagatccagaaaaacccatggaggcctgtgcctcagcacatgtgcaacccaagcctgcccctgaagccagtagcctagaggagccccatagcccagaaacaggggagaaggtagtagcaggagaggtaaacccacccaatggccctgtgggggacccactgagcctcttgtttggggatgtgacatccctgaaaagctttgattcattgacaggttgtggtgacataatagcagaacaggacatggacagtatgacagacagcatggcctctgggggccagagagcaaaccgagatgggaccaagcgaagttcctgcctggtgacctaccaaggaggtggggaggagatggccttgccagatgatgatgacgaggaggaagaagaggaagaagaggtggaattagaggaggaagaagaggaggttaaggaggaggaagaagatgatgacttagaatatctgtgggaaactgcccaaatgtatccacggcccaatatgaacctgggctaccatcccaccacatccccaggccaccacggctacatgctccttgacccagttaggtcttatcctggcctagcccctggggaacttttgactcctcagagtgaccagcaagaatccgcccccaatagtgatgaaggttattatgactccaccacacctggatttgaggatgattcaggtgaggccctggggcttgtccgcagggattgtctaccccgagacagctacagtggagatgccctatatgagttctatgagccagatgacagccttgagaactctccacctggagatgactgcctttatgacctccatggtcgaagctctgagatgtttgaccccttcttaaactttgagccctttttgtcctcccggccacctggggcaatggagacagaggaagaacggctagtgaccatccagaaacagttgttgtattgggagcttcggcgggagcagcttgaggcccaggaggcacgtgcccgagaagctcatgccagggaggcccacgccagggaggcctatactcgagaggcttatggcagggaagcctatgccagggaggcccacacttgggaagctcatggcagggaggccagaacccgagaagcccaggcccgagaggttcgttgtagagagactcaagtccgagagacccaggcccggcaggagaagcccgtcttagagtatcagatgaggcccttaggcccatcagtgatgggcctggcagcaggggtatcagggacctctcagatttcccaccggggaattacctcagctttccccaccactgcaagcagcgagccagactggagggacttccgtcctctggagaagcgttatgaaggaacctgctccaagaaagatcaaagtacctgcctgatgcagctcttccagagtgatgccatgtttgagccagacatgcaagaagcaaattttggaggatctcccaggagggcctaccctacttattcaccccctgaagatccagaggaagaggaggttgagaaggaagggaatgccactgtgagtttctcacaggccctggtagagttcaccagcaatgggaacctcttttccagcatgtcctgcagctctgactctgactcatctttcactcaaaacctccctgagctgcctcccatggtgacctttgacatcgctgatgtggaacgggatggggaaggcaagtgtgaagagaatcctgagttccacaatgatgaagatcttgcagcctccttggaagcctttgagctgggctactatcacaaacatgccttcaacaactaccatagtcgattctaccaaggcctgccctggggtgtgagcagcctccctcgatacttgggactgcctggcctgcaccctcgacctccacctgctgctatggccctcaacaggagaagccgctctctcgacactgcagagaccctggagatggagctctccaattcccacttggtccagggctacctcgagtctgatgagctgcaggcccagcaggaagattcagatgaggaggacgaagaggaggaagaaggagaatggagccgagacagtcccctttccctctatactgaacccccaggggcctatgattggcctgcttgggctccctgtcctcttccagtggggccaggtcctgcctggataagccccaaccagttggacaggccttccagccagtctccatataggcaggcaacctgttgcatacctcctatgaccatgtcaatatcactatcagtgccagagtcaagggcacctggggaatctgggcctcaactagctcgtccctcacacctacacctgcccatgggcccttgctataacctccagccacaggcctcccagagcatgagggccaggcctcgagatgtgctgctgcctgttgatgagcccagttgctcttccagttctggaggcttcagccccagccctctaccacaggccaagcctgtgggcatcacccatggcattcctcagctgcccagggtccggcctgagcacccccagcctcagcccactcactatgggccttccagccttgacctgtcaaaggagagggctgagcaaggtgcctctcttgccaccagctactcctccactgccatgaatggaaacctagccaagtagttattatcaattctggagtagggacacggggcctgagcatgtgaatggggatcaggggttgggcagaagggtgggggggtgggggttgttgtttaacttgaaaaccctttgggccaaggaaaactcctgtgagttttcaccttggttttcccacttgcctcttctgccatctatggccacgttcaactcaagtgcatctgcccagggaggctgctgctgctactgcactccagtttttgctttcgaggtttcttcttgtgacccacgctgggtttgggatgctgtaattttgtgcctattccagttgccaagttagtgattatatatatatatatatatatatatatatatatatatatatatacacacacacacacacacacacacacacacatacatacacacacacacacaaacacacatgcacacacatatatagcatgcatccttgacacaggctaaacctttagtgccccctgcccctttcccccaatgaatgatgaaccactgattagcagccaagtctgcattgcctcccgcttggggaagtggggcttatttgctattagcaatgtgaaattatggtacagatcctccccacccctattccttttggcctggcatagctgccatcattatatcagatgactataagctattcatcccagctagctgtccttagagaggatcaagtagcgtgtgtctcacagcctatcgctgtggactttggcatcatgaccagatgggggccttttaactgtcctgccatagcttgggttaaagacaaaaatgctaatccccttgatggagtgataaaattcatccatttgcaaacagaagacaaaacaaggttctgttgtggacactgccatagagtgttgagctccggaatgataggattttttttccttcttttaagcttgtgactacctgagttgcagatgcttttgaatttttgttcttttttcctctaaaggaaattttcataatctcatcacaaggaacacggtcttttaattgagataagggaagagaagcaacctaaattaggcttgactataggggctggggtttttgtggagtgtaggggaaagatagaaaatgagggtccatttatcacagccagcaagaaaggggatttcagaccatgcagagcttaaggtatctcagtttcttaaaagggaaaactcccttctcaagcctcccaacacaaaatgttccttaagccttgcccatcccatcatttggactctgtaataaggccccaggtttgcactcccaagacaggataccaaaggcatctcagctgctgttctgggccctttaaagagcttttatcttccaattagccgagtccttagcatcatcaaatgacagggcttcttggcagttgcagccctttatggaatgaatggcaccctcccttctcctgcatccatgcagttttcatgttaaactaggttggaaatactggtggggaagagcttgctgtcaggaagacattggaacaggctaatcttgccaagctcaacctctcattaatcacctgtaggagagggttccttttacatgtctttattggaaatggcatatggaacattttttgcttggctgtgttcactcaaattatgattattgcaccctcgccctcacatcccaccatctccatgcctgttgagagaagaagtcaacagggttcttgccattcctgagatatggcaatttagcttgggaacagatgctgtttgccccctaagtcaaggtgactttgtgggcaaactgtttcttggccaggggatgtgtccatgctggtctttgtcaccatttctcagattggggttggcccagtgcccttactcacaaatagcagacctggctggtagaagctgcacccctggaagcaccacatgaatttgcatggcactaacaccaccactcaagggacccagaccagctcttcaggctgactttggctacagatacattgtgaagaaatgtatctgttgtggagctggagaatgaaagagggtgaggaaggccctccttaccccaagcacagcattccaagagagaagtgcccaaattccaactttctggcctcttaccaaagctgctctgggatggtggggctgaaattggcctggctatttggcaggaagtaaacactcaccaaatgcctttacaacagggaagaacccacctcttgcctcttctttcagggcagcttgagctcctgtctacatgtggactgtgccagccacagcaggcggtagagccatcaccagcctccagaccctgctggagaagggccaccagcctatctgggaagagaaaaaggaggtggccaacctttggctaagggctgagagctgccctcaggatcaggaaggcagcatgaggcattgtctctgaggggcactggcatagccctgacacactttgttgggctttggaaggtcacacaccacagagtagggcctggggctgagtgagagttcatggtttggacagccttgctgcctgcaagtcccttcactgccctagccagcccaggaataggatccttaccacctgaagtggggcagccaggatatgtggctgcagaagcaggttcctttgaatttctagagctaagcagtttgtggctgaaacccaatggcagcctaggggaggaaggaagacctgtctggggacccatggtgttgacagcacagggtgacattgggagagccagccaagcttcaggcctgtttccaaacacagactagtgctggcttgggtggcagcaaatacaccccagaccactaaaactgttgatatcatgtccacacctccaagagtactactagatgaacaacatgtctccattgcaaggtcctggaataatgcttttggatgtgattttaagggaaaatgggacttagtggaagtagctgccttcatcttattacccaataggcctagtgccagacagctgtgatcctgagaattcccagatgagactggtccttggaggaccagtgaatgtggatagagaaggccacctagtaggcctctcccagggccaggatgccagtttcttggtgctttagagtctccaaggaagcactgccttggggcccagttcaagccagccctacctatctggcctcagcttgggtaccaggccacaagactgcccggataatgggttcagtaaacaccagtctctctccctccttagtcctatgccaagaagggaagtagcttcacacactcaggaggctgggtgtgtacccttcatcctgctgccagcagctttccttacctgtgccagtgccaccaccccacctgccctcagcccccaggcccagttgctagagggaggcatggggtttagcagggagacttcaagtttacccatgtgtatgttgcattcaagttgtttttaatatatatatatatatatatcaaaagtcaattatctatttttatattgtttgcattttatattcatggaaaacaatgtttatcaattgttcttttctgatttatttttaagcggtgctgtttacagttttaaacaaaacaaagatgacacaaaaattgctgctgcttgtgcagagggctggcatctcaactgcctagggccctccctctttcccctctccctaccttagctgtaccacactgtccgttccctccccccatgatagggacagcagaagatgcccaggtactgaagacaaacgccaagtgactcaggcgtgtgggacctggtagacagcttgtcattttctggctttattttatgtttttctttcttttgaacccttcttccccatgtctagaccctctgagagtactcatgtgtcttattttttttcctcgttatgttttgtgctttagttttgaaatcagagtgcccatgttgtgctatttgtcttgttgagtttctccaaaggagcattttgggaacattctccacccaatggggaaggaagggggtttcaaccatgtcccctttccccaagaagctgtgggagacagatgacaatgatgcttgcactatcaggaatttaccatctcgttgaggaaacccttgcataggacttcctaggagctcagttgattgtgacattttcccagaagagaggctttggggaactccttcacccctcttgctgctttgggggaatctcctcccctaccaccattccccctcccctgccctgctccagctcacacgtggatggtactttggggaacagtgactttcagggtgatggcttgctggcctgatccctgactttccaatcctatagtcactccaaagaagaaaatccacatggtatgtatatgtgtgagggttgggtctattgagaggtgggactttaattattgttattattattggtgcttatttttcctgctgtatatgggggtgggggtgggggggaataaaacaggaatgtatatttaggtcatgttaaataaaatggctggaggaaggagggaagaaattaggaactgcagtacatcatcaccccaggtgtaagagttatttctctcccagtgcagaaaggggagtgtggcccctggctgtacctgagcttcctcttctccatccctgagacatcacagaatcacccgggttctgacctctccacttctagctctcactgacatctggatatcttgatgcactgcctgtttgtaacaacatatacttctttgctgaatgctaataaacttctgggttcaagagggaacccctcagtca

SEQ ID NO: 131 - DNA, 1068 bp, Homo Sapiens
gtgcgcggagtcagagccgccaccgctgccgcagttgccgccactgcggcgtctgggctgagccggagggaggcgggaggacgcgcaggggcggccgccgccgtcgtcaggccaccggggcgaaaatgcggccgctgccggaggctcgctaactttccggggcggaagaggaggaggaggaggaggaaggggcttggagcgactacggggggatgcggagaagcagtcagttccctgcacccagcacctcacagcccttcctccgtgcgccctgccgggcggcgagctaggcggcagcggcgcggcgcgggctcggcggagcggcccatgtccggcgcgggcgaagccctcgctcccgggcccgtggggccgcagcgcgtggccgaggcgggcggcggccagctgggctccacagcccagggaaaatgtgataaagacaatactgagaaagatataactcaagctaccaatagccacttcacacatggagagatgcaagaccagtccatttggggaaatccttcggatggtgaactcattagaacccaacctcagcgcttgcctcagcttcagacttcagcccaggtgccaagtggtgaggaaataggcaagataaagaacggccacacaggtctgagcaatggaaatggaattcaccacggggccaaacacggatccgcagataatcgcaaactttcagcacctgtttctcaaaaaatgcatagaaaaattcagtccagcttgtctgtaaacagcgatatcagtaagaagagcaaagtaaatgctgtcttttcccaaaagacaggctcttcacctgaagattgttgtgtccactgtatcctggcttgcttgttctgcgaattcctgaccctttgcaacattgtcctgggacaagcgtcatgtggcatctgcacctcagaagcctgctgctgttgctgtggtgacgagatgggggatgattgtaactgcccttgtgatatggactgtggcatcatggatgcctgttgtgaatcatcagactgcttggaaatctgtatggaatgctgtggaatttgttttccttcataa

SEQ ID NO: 132 - DNA, 6806 bp, Homo Sapiens
ggaaaatacttttctctagcatcgtaggaggaagaaaacaaacacatcagatattttcagcactaaaagagatggttttccccacatatatgtaaaagaaatttgcaagactactggattttgatctcatggttgcagtgggtgaataggtggccttttgtgatctcctacatcaccctggaagtgagacttcttcggtttcttctagagtcagtttggtatcagaatggcaaagcaacttaaccttccagaaaatacagatgattggacaaaagaggatgtaaatcagtggttagaaagtcataagattgaccaaaaacacagggaaattttgactgaacaagacgtgaatggagcagtcttgaagtggttaaaaaaagaacatcttgttgatatgggcatcacacatggaccagctattcaaatagaagaactattcaaagaattgcggaaaacagccattgaagattcgattcagacatctaagatgggaaagcccagtaaaaatgctcctaaagaccaaactgtgtctcaaaaggaacgtagagaaacttcaaagcaaaaacaaaagggtaaagagaacccagatatggctaatccgtctgcaatgagtacaactgctaaaggttctaagtcactaaaagttgagctcatagaagataaaatagattatacaaaggaaaggcaaccatccatagacctgacatgtgtatcatatccatttgatgaattcagtaatccatatcgttacaagttggattttagtctacagcctgaaacaggaccaggcaatctcattgatccgatacatgaattcaaagccttcacaaatacagcaacagccacagaagaggatgtcaagatgaaatttagcaatgaggttttccgatttgcttcagcttgtatgaattcacgtaccaatggcactattcattttggagtcaaagacaaaccccatgggaaaattgttggcatcaaagtcaccaatgataccaaggaagccctcattaaccatttcaatctgatgataaacaagtattttgaagaccatcaagtccaacaagcaaagaagtgcattcgagagccaagatttgtggaagttttactgccaaatagtactctatctgacagatttgttattgaagtggacattattccacagttctctgaatgccaatatgattatttccagattaaaatgcaaaattacaacaacaaaatatgggaacaaagtaaaaaattctcactatttgtgcgagatgggaccagctctaaggacattacgaaaaataaagttgatttcagagcatttaaagcagattttaaaacactggcagagtccagaaaagcagcagaagaaaaattcagagcaaaaacaaataaaaaagaaagagagggaccaaagttggttaaattattgacaggaaatcaagatttgttagataattcatactatgaacagtacattcttgtaacaaataaatgccacccagatcaaacaaaacacttagatttcctgaaggaaattaaatggtttgctgtattggagtttgatcctgagtctaacatcaatggagtggtcaaagcttacaaagaaagccgagtagcaaaccttcactttccaagtgtatatgtagaacagaaaaccacaccaaatgagacgatttctactctaaatctttaccatcaacccagctggattttctgcaatggcaggttagaccttgacagtgaaaaatataaaccctttgatccaagttcctggcaaagagaaagagcttctgatgtcaggaaactgatttcatttcttacacatgaagacataatgccaagagggaagtttttggtggtatttctattactgtcctctgtggatgacccaagagatcccctcattgagactttctgtgctttctaccaggatctcaaaggaatggaaaatatactgtgtatttgtgtgcacccacacatatttcagggatggaaagatctacttgaagcaagattaataaaacaccaagatgaaatttcaagccaatgtatttctgctttaagccttgaagagatcaatggcactattcttaaactaaaatctgtgactcaatcttcaaaaaggcttttgccatctattggtttatcgactgtccttctgaaaaaggaagaagatatcatgactgctctggaaattatctgtgaaaatgaatgtgagggtacactgttagagaaggacaaaaataaattccttgaattcaaggcatcaaaagaggaagacttctatcgaggtggcaaagtgtcatggtggaacttctacttctcttctgaaagttattcttcaccttttgtcaaaagggataaatatgaaagacttgaagcaatgattcaaaactgtgcagattcttctaaaccaacaagtaccaaaattattcatctgtatcatcatccaggctgtgggggaactaccttggctatgcacattctctgggaactaaggaagaaattcagatgtgctgtgctgaaaaacaagacagtggatttttctgaaattggagaacaggtaaccagtttaatcacctatggggcaatgaaccgtcaggaatacgtacctgtactactccttgttgatgattttgaagaacaagataatgtctatcttctgcagtactctattcaaacagctatagctaaaaagtacattcgatatgaaaaacctctggtgattatcctaaattgtatgagatcacaaaatcctgaaaaaagtgcaaggatcccagacagtattgccgtaatacagcaactctctcccaaagaacagagagcttttgagcttaaattgaaagaaatcaaagaacagcataaaaactttgaggatttttattcctttatgatcatgaaaaccaattttaataaagaatacatagaaaatgtggtccggaatatcctgaaagggcagaatattttcaccaaggaagcaaagctcttttcttttctggctcttcttaattcatatgtgcctgataccaccatttcactatcacagtgtgaaaaattcttaggaattggaaacaagaaggctttctgggggacagaaaaatttgaagacaagatgggcacctactctacaattctgataaaaacagaggtcatcgaatgtgggaactactgtggagtacgcatcattcactctttgattgcagagttctcactggaagaattgaagaaaagctatcacctgaataaaagtcaaattatgttggatatgctaactgagaatttgttcttcgatactggtatgggaaaaagtaaatttttgcaagatatgcacacactcctactcacaagacaccgcgatgaacatgaaggtgaaacaggaaattggttttccccatttattgaagcattacataaagatgaaggaaatgaagcagttgaagctgtattgcttgaaagtatccatcggttcaacccaaatgcattcatttgccaagcgttggcaagacatttctacattaaaaagaaggactttggcaatgctctaaactgggcaaaacaagcaaaaatcatagaacctgacaattcttatatctcagatacactgggtcaagtctacaaaagtaaaataagatggtggatagaggaaaacggaggaaacgggaacatttcagttgatgatctaattgctcttttggatttagcagaacatgcctcaagtgcattcaaagaatctcaacagcaaagtgaagatagagagtatgaagtgaaggaaagattgtatccgaagtcaaaaaggcggtatgatacttacaatatagctggttatcaaggagagatagaagttgggctttacacaatccaaattctccagctcattcctttttttgataataaaaatgagctatctaaaagatatatggtcaattttgtatcaggaagtagtgatattccaggggatccaaacaatgaatataaattagccctcaaaaactatattccttatttaactaaattgaaattttctttgaaaaagtcctttgatttttttgatgaatactttgtcctgctaaaacccaggaacaatattaagcaaaatgaagaggccaaaactcggagaaaggtggctggatattttaagaaatatgtagatatattttgtctcttagaagaatcacaaaacaacacaggtcttggatcaaagttcagtgagccacttcaagtagagagatgcaggagaaacctagtagctttaaaagcagacaagttttctgggctcttggaatatcttatcaaaagtcaagaggatgctataagcactatgaaatgtatagtgaacgaatatacttttctcttagaacaatgcactgtcaaaatccagtcaaaagaaaagctaaatttcatcttggccaacattattctctcctgtatccaacctacctccagattagtaaagccagttgaaaaactaaaagatcagcttcgagaagtcttgcaaccaataggactgacttatcagttttcagaaccgtattttctagcttccctcttattctggccagaaaatcaacaactagatcaacattctgaacaaatgaaagagtatgctcaagcactaaaaaattctttcaaggggcaatataaacatatgcatcgtacaaagcaaccaattgcatatttctttcttggaaaaggtaaaagactggaaagacttgttcacaaaggaaaaattgaccagtgctttaagaagacaccagatattaattccttgtggcagagtggagatgtgtggaaggaggaaaaagtccaagaacttttgcttcgtttacaaggtcgagctgaaaacaattgtttatatatagaatatggaatcaatgaaaaaatcacaatacccatcactcccgcttttttaggtcaacttagaagtggcagaagcatagagaaggtgtctttttacctgggattttccattggaggcccacttgcttatgacattgaaattgtttaagagcctgatattcttcctccaagaatttgatctcagtacccatttaatttttttggactcaagatctatgctttaaaccggcaaggttatagatacagcctctagctcttcagatctgtacatgcagtatttaatttcctcttaaacatgttatgagttctacaaagacaatagtgaaaaaggaaggagtgagatatatgaaaagtagcaaatatgttccttggtttggttaacatcattgatgacaaaataataaggagctatgactggagtcaggagaagttagtgtaataagctggctacacagaaccccactacttaccaggcatggattgaagaagattgtctactcaaatggcatttagacattagaatgtctgggaaaatatttctcaaagacagcaaaaacctctcaaactgaggagcaacatttattcttactaagcagatcatcaatgtatcatgtgcttggcactcaaggatcttccaaaacagaggaccaaccagtcttctgaaggtcatgcccacagaagtcatcagaccttaccaaagtaggttggagaattagattgccttttcatgcagtgagattcagttaagcaaaaatgaaatttgtctctatagctaattagcttatcaactcccctccaaacaaacaattaaaaaaaaaacatacagacactcaaattccacaagctaatgaacaaaagggactcttgtgagaagactaatgagtccctcatccagaagatgccaatgtactggcagattaacatacaacctatgttttgaacaaaaacaaccagcgatacgtaatcaaaatgtaattttcccctaataaaattatggatatgggcagtcatcaatggctgccaaaaccattaagtggaaagctgattaaaaaacaaaaatttctaatggatttatcaaactgtcccaaatcctgataaatattaacatcacagaggaagaccagacattatgggcctggaagtactataggagtgcacacatcacccgtgacatggtcttgccaaataattaaacctgaatttgatcaggtctctggatcttatttgcaattcaaaagaaattttaaaaaaatcctactaacaccaccacaaatatgcaatcagcaatatccagaaaggggaaattcacaggacaaaaacctggttttcttttttggtttcttcaaccaaaaaagaaagaaattgcaaaggaccaaaaaaatgttggggaatctatacattataagggacttaacaactaaagggcaacatatagactttagatcctaatttgagcaaaatctaaaatcaattattaggcaatcagaaaaatttgaacacagactagatatttgaggatattaaggtactatattattgaagattccatggttatgttttttaaagagttcatgccttttagagatacatactaaagtatttgtaaataaatgacatgatctagaatcagtaattttgtgtttggggtgtgggggtggtgaaagggaagtagaaccgaaacaagattagtcctgagttaacaatggctgcaagctggatacatggaattcagcacacttttctccctcttactgattatgcttttgaaattttctcttgtaaaacatttagaaaacaaaaacaaaaaaaatgtgatttgtttctgtcttcaaaatctcattagaattttttcactggaggaagattttcccttgcttctgcataaaattttaactccataacttataagctcactctttattgttactttctaattgacaaataaaaattgtatatta

SEQ ID NO: 133 - DNA, 364 bp, Homo Sapiens
gtgcgaacagcagctggtaccgaaggcggaggtggagcccgagagcagcagcggaagatgtcggacagcgaggacagcaacttttccgaggaggaggacagcgagcgcagcagtgacggcgaggaggccgaggtagacgaagagcggcggagtgcagcgggcagtgagaaagaagaagagcctgaggacgaagaggaggaggaagaggaggaggaatacgatgaggaagaggaggaagaagatgatgaccgaccccccaagaaaccccgccatggaggcttcattctggacgaggctgatgttgacgatgagtatgaggacgaggaccagtgggaggatggagcagaggacattctagagaaag

SEQ ID NO: 134 - DNA, 2265 bp, Homo Sapiens
ctcgctcacaaaaaattgagccggccctggaggcctggggggcgagtccggttgcgcctcggagagcgcaacaggcagaatttgttcctgttgaagagtggctcctcttctaatttccagactccttgaggttttaggagtctggtaggtgaaattttctacctctaaggagaaacagtacctgctccttcctcaagcgcaagccctccattgctatggataccgaatccacttattctggatattcttactattcaagtcattcgaaaaaatctcacagacaaggggaaagaactagagagagacacaagtcaccccggaataaagacggcagagggtcagaaaagtctgtcaccattcaacctcccactggagagcccctgttgggaaatgattctactcggacagaggaagttcaggatgacaactggggagagaccaccacggccatcacaggcacctcggagcacagcatatcccaagaggacattgccaggatcagcaaggacatggaggacagcgtggggctggattgcaaacgctacctgggcctcaccgtcgcctcttttcttggacttctagttttcctcacccctattgccttcatccttttacctccgatcctgtggagggatgagctggagccttgtggcacaatttgtgaggggctctttatctccatggcattcaaactcctcattctgctcatagggacctgggcactttttttccgcaagcggagagctgacatgccacgggtgtttgtgtttcgtgcccttttgttggtcctcatctttctctttgtggtttcctattggcttttttacggggtccgcattttggactctcgggaccggaattaccagggcattgtgcaatatgcagtctcccttgtggatgccctcctcttcatccattacctggccatcgtcctgctggagctcaggcagctgcagcccatgttcacgctgcaggtggtccgctccaccgatggcgagtcccgcttctacagcctgggacacctgagtatccagcgagcagcattggtggtcctagaaaattactacaaagatttcaccatctataacccaaacctcctaacagcctccaaattccgagcagccaagcatatggccgggctgaaagtctacaatgtagatggccccagtaacaatgccactggccagtcccgggccatgattgctgcagctgctcggcgcagggactcaagccacaacgagttgtattatgaagaggccgaacatgaacggcgagtaaagaagcggaaagcaaggctggtggttgcagtggaagaggccttcatccacattcagcgtctccaggctgaggagcagcagaaagccccaggggaggtgatggaccctagggaggccgcccaggccattttcccctccatggccagggctctccagaagtacctgcgcatcacccggcagcagaactaccacagcatggagagcatcctgcagcacctggccttctgcatcaccaacggcatgacccccaaggccttcctagaacggtacctcagtgcgggccccaccctgcaatatgacaaggaccgctggctctctacacagtggaggcttgtcagtgatgaggctgtgactaatggattacgggatggaattgtgttcgtccttaagtgcttggacttcagcctcgtagtcaatgtgaagaaaattccattcatcatactctctgaagagttcatagaccccaaatctcacaaatttgtccttcgcttacagtctgagacatccgtttaaaagttctatatttgtggctttattaaaaaaaaaagaaaaatatatagagagatatatatctatgccagaggggtgtcttttttaaaaattcttcttcattgctgactgaaactggcagatgattgaccagtatcctttgaccatctgcactttatttggaaggaagcaggggctgtccaccctgaaaaagagtgactgatgacatctgacttttgtcgatgggacttctcaagaagccattccttggagcttctgttacagctgtaaaccaaagtggagctggtgcttcttgggagcctcgccttacaactaattcctgcctttcgtccagtaccaagtcccccgttgcttctggtcagcccacttgtagacttccaggggacacatctttattctgtttcaggaaaccagtcacgacacgtccacatatgtatttgtgtatgttaatgtccagtatcacatcacccatgaaagt

SEQ ID NO: 135 - DNA, 2566 bp, Homo Sapiens
agaccgacgcgatgaagcccagacctgcagggttcgtggataataaactcaagcagcgagtcatccagtaccttaccagtaacaaatgtggcaaatatgtggacattggagtcttagcgtctgatttacaaagagtgtacagtatagactatggtcgaagaaaaagaaatgcttttaggattcaggtagaaaaagtatttagcataattagtagtgagaaggaacttaagaatttaacagaattagaagatgaacatttggcaaaaagggcaagacaaggtgaagaggataatgagtatactgaaagctattctgatgatgattcaagtatggaagactacccagatccacaggattcaaaagattcttctcttttggagagtgatatgaaacggaaaggcaagctaaagaataaaggaagcaaaaggaagaaagaagatcttcaggaagtagatggagaaattgaagctgtcctgcaaaagaaagctaaagccagggggttagaattccagatctccaacgtgaagtttgaagatgtgggaggcaatgatatgacattaaaagaggtctgcaagatgctcatacacatgcgtcacccggaggtgtaccaccacctgggcgtcgtgccccctcgtggagttctccttcatggaccaccaggctgtgggaagacattacttgcacatgcaattgctggggaacttgacctgccaattttgaaagtggctgctccagagattgtgtctggagtatccggagagtctgagcagaagctgagagaactatttgagcaagctgtgtcaaatgcaccatgtatcattttcattgatgaaattgatgctattacccccaaaagagaagtggcttcaaaagatatggaacgaagaattgtagcccaactcctaacctgcatggatgatctgaataatgtggctgctacagcccgggtcctagttattggagctactaatcgaccagactcgttagaccctgctttgagacgtgcgggaaggttcgaccgagaaatatgcctaggtatcccagatgaagcatccagggaaagaatacttcaaacattgtgcagaaaactgaggcttcctcaagcttttgatttctgtcacttagcacacctaactccaggctttgttggtgctgatctcatggcactgtgccgagaggcagcaatgtgtgcagtcaatagagtcttaatgaagctacaggaacagcagaagaaaaatcctgaaatggaagatttgccatctaaaggagtccaggaggaaaggctgggaactgagcccacttctgaaacacaggatgaattacaaaggctgctggggttgctaagagaccaagatcccctctcagaggagcagatgcaaggactgtgcattgaactgaatgatttcattgttgctctatcctcagtccaaccctctgccaaaagggaaggctttgtcactgtccctaatgtgacatgggcagatattggtgccctggaagacattagagaggagctcaccatggcaatattggcaccagtacgcaacccagaccagttcaaagctcttggattggtgactccagctggggtcctccttgctggtcctcctggctgtgggaagactctgctggcgaaggctgttgcaaatgagtccggactaaattttatatctgtcaagggccccgaattactaaacatgtatgttggtgagagtgaacgtgctgtgcgacaagtttttcaacgagccaagaactcagcaccctgtgtgatattctttgatgaagtggatgctttatgtcctcgaagatcagaccgagagacaggggcaagtgtccgagtggtgaatcagctacttacagagatggatggtctggaagcacgccagcaggtttttattatggcagccactaacaggccagatataattgaccctgcaatcctgcgcccgggccgcctggacaaaacactgtttgtgggtttaccgccccctgcagatcgccttgccatcttaaaaactatcacaaaaaatggtaccaaaccaccactggatgcagatgtaaatttggaagcaattgctggtgaccttcgctgtgattgctatacgggcgcagatctctctgctttggtacgagaagcttctatctgtgccctgagacaggaaatggcaagacagaagagtggaaatgaaaaaggtgaactcaaggttagtcataagcattttgaagaagctttcaagaaagtaagatcatctatatcaaaaaaggatcaaatcatgtatgaacgtttgcaggagtccctcagccggtgatgtctccagcagccggcttagaggagctagcccatcaagccggcagagaatcccccacacgctctgaaggacccactttcagctggacacaggcgcggcctcatgtaaacattttattttcaaatgaatgaggccaagctgaagctgaagctgaagattcttcccatctggccagccttgtgtgaaaatgccttcttcctctttaagaaaaaggacaatttttaaactgctgaaataaaatgactgttacatttttc

SEQ ID NO: 136 - DNA, 651 bp, Homo Sapiens
cggctcgggcggacgcggcggctgctgccggggagcgagccggcggcgcgggcgagccgagcgcgagaggccaatgagacttgaaccctgagcctaagttgtcaccagcaggactgatgtgcacacagaaggaatgaagtatggatgtgaaagaacgcaggccttactgctccctgaccaagagcagacgagagaaggaacggcgctacacaaattcctccgcagacaatgaggagtgccgggtacccacacagaagtcctacagttccagcgagacattgaaagcttttgatcatgattcctcgcggctgctttacggcaacagagtgaaggatttggttcacagagaagcagacgagttcactagacaaggacagaattttaccctaaggcagttaggagtttgtgaaccagcaactcgaagaggactggcattttgtgcggaaatggggctccctcacagaggttactctatcagtgcagggtcagatgctgatactgaaaatgaagcagtgatgtccccagagcatgccatgagactttggggcaggggggtcaaatcaggccgcagctcctgcctgtcaagtcggtccaactcagccctcaccctgacagatacggagcacgaaaacaagtccgacagtgagaatg

SEQ ID NO: 137 - DNA, 4164 bp, Homo Sapiens
gagcggccgcgccccctgcgctgccaacccgcgagcccgcatcatggatgtcgagctcccctatttcgcattgctagccctggaattcgagaccccagacgaggaccaggattcatgaaatcagtcgcaggggccggggcaggggcctctggctcccgacactggccgagaggtgatgagtgaggttcgaagaacggaagatttaaaaagcagccggggcctccgtattgaatgaaagacccagtgcaaagacatcaccatgaacactagcattccttatcagcagaatccttacaatccacggggcagctccaatgtcatccagtgctaccgctgtggagacacctgcaaaggggaagtggtccgcgtgcacaacaaccacttccacatcagatgcttcacctgtcaagtatgtggctgtggcctggcccagtcaggcttcttcttcaagaaccaggagtacatctgcacccaggactaccagcaactctatggcacccgctgtgacagctgccgggacttcatcacaggcgaagtcatctcggccctgggccgcacttaccaccccaagtgcttcgtgtgcagcttgtgcaggaagcctttccccattggagacaaggtgaccttcagcggtaaagaatgtgtgtgccaaacgtgctcccagtccatggccagcagtaagcccatcaagattcgtggaccaagccactgtgccgggtgcaaggaggagatcaagcacggccagtcactcctggctctggacaagcagtggcacgtcagctgcttcaagtgccagacctgcagcgtcatcctcaccggggagtatatcagcaaggatggtgttccatactgtgagtccgactaccatgcccagtttggcattaaatgtgagacttgtgaccgatacatcagtggcagagtcttggaggcaggagggaagcactaccacccaacctgtgccaggtgtgtacgctgccaccagatgttcaccgaaggagaggaaatgtacctcacaggttccgaggtttggcaccccatctgcaaacaggcagcccgggcagagaagaagttaaagcatagacggacatctgaaacctccatctcaccccctggatccagcattgggtcacccaaccgagtcatctgcgacatctacgagaacctggacctccggcagagacgggcctccagcccggggtacatagactcccccacctacagccggcagggcatgtcccccaccttctcccgctcacctcaccactactaccgctctgctggagacagtaacatctaccggaaacccccgatctacaaacggcatggtgatttgtctacagcaaccaagagcaaaacaagtgaagacatcagccagacctccaagtacagtcccatctactcgccagacccctactatgcttcggagtctgagtactggacctaccatgggtcccccaaagtgccccgagccagaaggttctcgtctggaggagaggaggatgattttgaccgcagcatgcacaagctccaaagtggaattggccggctgattctgaaggaagaaatgaaggcccggtcgagctcctatgcagatccctggacccctccccggagctccaccagcagccgggaagccctgcacacagctggctatgagatgtccctcaatggctcccctcggtcgcactacctggctgacagtgatcctctcatctccaaatctgcctccctgcctgcctaccgaagaaatgggctgcacaggacacccagcgcagacctcttccactacgacagcatgaacgcagtcaactggggcatgcgagagtacaagatctacccttatgaactgctgctggtgactacaagaggaagaaaccgactgcccaaggatgtagacaggacccgtttagagcgccacctgtcccaggaagagttctaccaagtctttggcatgaccatctctgagtttgaccggctggccctctggaagaggaatgaactgaagaagcaagcccggctgttctaggcagaggctctataaatatatatgcatttatataaagatatatgtaaaatctctctactgaagctcggtataatcctctcttgtgtaatgggacacactgcctgccatgagacttgcttttctgtactgtcaggcaagcccacgtcatcgagatatttttatgctccttactttctcttttctaagtgctgtgggatctgggaagggatttgaggggactctgtccttttattggggatcctttttatactgaaacatctgtcctaacttgagtgccccaaggtccaactctctttcctaaagaaggtgcctgaagaagtctctcttctctctgcttcgtggcccctttcttaaatttctagggctgatgctgaccatgtggtttccacaccttattggccccagaggggccctcccatgggaagatctgcagcagtctccccaaatcagtgagcacctttgagcgcccacgaagaactttctcaacacccccaattaggagctcagtgctctcttggggcaatgcagttaaaagggtgagcctcaaatctagtcattacaccagtcaacagaagtggacagggcctaggcctctcctcagctccttaaccctcctccttctgccctggattgtaacctctcccttgtccaaatctaggattcctggtaggaaaaggaaaaggcccttcccttccctccaccacttccaactggcccctttgcctgacctggacttggagaaccagaggaaaagagagggagcggaagtgggagatggagcagggcacctgttagaatcagagctgcaggatttcttgggaccctcctctctccctcactgctcccagcacctcctgacccttccctctttcaaggagaagcccatgattgcagcttgtattctttagccttattacaatctatgtgcctgacaactcaacacaccgcagggctaatgttcccaccagagctccaactgaacaaccagacagacaactctcatcatcctccagagagaaaataggccgtgtctcaaagaaaggttcttggtctatgcctctggtctgtgggctggcagggcaaccataccatacccccgccagtcctcggctcctgctgcaaagttggccatgtttcacagggaaacttttggaagagtggctgcttatgagattccaaaatgaagtgttggccaacaccgctcatggccatcctggattttcccagtggcttcccttcctgctcgcctccctgaacaggggagaaagcttaacctctcttctcctctccaaacctttcaccttgaatgggtaatgtttggtgggggctgttccttcttggagaagccttgagtcggaccattttgagatcatggaggaaggatgaagaagtgaaaatgacaataatgactctcaagaggctggcgatgtgacatggcaaatgtagaactgacttaaattgaacaaaccctcactgagcacctctgatgttgagcacctgctgaatactgagcactgaatgggggagggggaggggagcacggggtgagtcaacctgggactcggtctcagggatatgcctaccaatagcgggtatcgtaaggcatgtacccaaacataacggatgtaaggcagaaagtgatcggagaaggaatgagaaagtgtgcgtgatgttaatgaaaagtcatatgcagctagagcagacccaggaaagctttctggaagagattgcatctgaggaaattcaggaaggatctttgtagattggggggagattctaaattgaaggggtgatggggtgaggggccagagggaagtctgctgtgttctcatgtaggatgtcagccctccctgcaacttctctttttggccaatgtcttttcactttcctgaccctttagaatcatccccagccagacgcaatcatggaagttgccttattgtcactggttaagaacttggcgagattgaagggcttttgttattgttgttggatatttttgtttcccataaaagcacatcatttcaaccctaaacctgtgtgcttctgttgtttcttgtgtgggagtggaaatgactgacatgggaagaggctgaaccctgcacatttttcaaaatgaaagcaccaaaacagcagcc

SEQ ID NO: 138 - DNA, 717 bp, Homo Sapiens
gtgggctcggctagcaagctagaggggctcgtttccgccccgctaccgggcgggggcggccatcttagatgcgtgcaattaagggctttggcgggattggctccgcgtttgggctggtccgctgctccccacctaccagggtcggatccggagcccttccccgcggggcggggacctccaaacaaccgactcctttccagctgaagaaacacttaaattctggaaatagcgactcagtatcatggccagcagccttaatgaagatccagaaggaagcagaatcacttatgtgaaaggagacctttttgcatgcccgaaaacagactctttagcccactgtatcagtgaggattgtcgcatgggcgctgggatagctgtcctctttaagaagaaatttggaggggtgcaagaacttttaaatcaacgattggatgtggtcttgatcgtctgcaatgggaaaatgtatctgcgatgatcgaggaggtatttgaggcaacagacatcaaaattactgtgtacacactctgaaccagtgaacattttggatgtttccgtgttctcctgtgtcatctctactgggccataggaccgggcaaacctaccttaaaataggcagaggaaagtttcatgagaagtagtgtgtttaacaagacagactttggttgctgtattcaagtatttggattatgactgtggaggagggcttgcttaagatat

SEQ ID NO: 139 - DNA, 5101 bp, Homo Sapiens
agggagctccgaggacgagggggagggccggagctgcgcgtgctgctttgcccgagcccgagcccgagcccgagcccgagcccgagcccgagcccgaacgcaagcctgggagcgcggagcccggctagggactcctcctatttatggagcaggcacccaacatggctgagccccggggccccgtagaccatggagtccagattcgcttcatcacagagccagtgagtggtgcagagatgggcactctacgtcgaggtggacgacgcccagctaaggatgcaagagccagtacctacggggttgctgtgcgtgtgcagggaatcgctgggcagccctttgtggtgctcaacagtggggagaaaggcggtgactcctttggggtccaaatcaagggggccaatgaccaaggggcctcaggagctctgagctcagatttggaactccctgagaacccctactctcaggtcaagggatttcctgccccctcgcagagcagcacatctgatgaggagcctggggcctactggaatggaaagctactccgttcccactcccaggcctcactggcaggccctggcccagtggatcctagtaacagaagcaacagcatgctggagctagccccgaaagtggcttccccaggtagcaccattgacactgctcccctgtcttcagtggactcactcatcaacaagtttgacagtcaacttggaggccaggcccggggtcggactggccgccgaacacggatgctaccccctgaacagcgcaaacggagcaagagcctggacagccgcctcccacgggacacctttgaggaacgggagcgccagtccaccaaccactggacctctagcacaaaatatgacaaccatgtgggcacttcgaagcagccagcccagagccagaacctgagtcctctcagtggctttagccgttctcgtcagactcaggactgggtccttcagagttttgaggagccgcggaggagtgcacaggaccccaccatgctgcagttcaaatcaactccagacctccttcgagaccagcaggaggcagccccaccaggcagtgtggaccatatgaaggccaccatctatggcatcctgagggagggaagctcagaaagtgaaacctctgtgaggaggaaggttagtttggtgctggagaagatgcagcctctagtgatggtttcttctggttctactaaggccgtggcagggcagggtgagcttacccgaaaagtggaggagctacagcgaaagctggatgaagaggtgaagaagcggcagaagctagagccatcccaagttgggctggagcggcagctggaggagaaaacagaagagtgcagccgactgcaggagctgctggagaggaggaagggggaggcccagcagagcaacaaggagctccagaacatgaagcgcctcttggaccagggtgaagatttacgacatgggctggagacccaggtgatggagctgcagaacaagctgaaacatgtccagggtcctgagcctgctaaggaggtgttactgaaggacctgttagagacccgggaacttctggaagaggtcttggaggggaaacagcgagtagaggagcagctgaggctgcgggagcgggagttgacagccctgaagggggccctgaaagaggaggtagcctcccgtgaccaggaggtggaacatgtccggcagcagtaccagcgagacacagagcagctccgcaggagcatgcaagatgcaacccaggaccatgcagtgctggaggccgagaggcagaagatgtcagcccttgtgcgagggctgcagagggagctggaggagacttcagaggagacagggcattggcagagtatgttccagaagaacaaggaggatcttagagccaccaagcaggaactcctgcagctgcgaatggagaaggaggagatggaagaggagcttggagagaagatagaggtcttgcagagggaattagagcaggcccgagctagtgctggagatactcgccaggttgaggtgctcaagaaggagctgctccggacacaggaggagcttaaggaactgcaggcagaacggcagagccaggaggtggctgggcgacaccgggaccgggagttggagaagcagctggcggtcctgagggtcgaggctgatcgaggtcgggagctggaagaacagaacctccagctacaaaagaccctccagcaactgcgacaggactgtgaagaggcttccaaggctaagatggtggccgaggcagaggcaacagtgctggggcagcggcgggccgcagtggagacgacgcttcgggagacccaggaggaaaatgacgaattccgccggcgcatcctgggtttggagcagcagctgaaggagactcgaggtctggtggatggtggggaagcggtggaggcacgactacgggacaagctgcagcggctggaggcagagaaacagcagctggaggaggccctgaatgcgtcccaggaagaggaggggagtctggcagcagccaagcgggcactggaggcacgcctagaggaggctcagcgggggctggcccgcctggggcaggagcagcagacactgaaccgggccctggaggaggaagggaagcagcgggaggtgctccggcgaggcaaggctgagctggaggagcagaagcgtttgctggacaggactgtggaccgactgaacaaggagttggagaagatcggggaggactctaagcaagccctgcagcagctccaggcccagctggaggattataaggaaaaggcccggcgggaggtggcagatgcccagcgccaggccaaggattgggccagtgaggctgagaagacctctggaggactgagccgacttcaggatgagatccagaggctgcggcaggccctgcaggcatcccaggctgagcgggacacagcccggctggacaaagagctactggcccagcgactgcaggggctggagcaagaggcagagaacaagaagcgttcccaggacgacagggcccggcagctgaagggtctcgaggaaaaagtctcacggctggaaacagagttagatgaggagaagaacaccgtggagctgctaacagatcgggtgaatcgtggccgggaccaggtggatcagctgaggacagagctcatgcaggaaaggtctgctcggcaggacctggagtgtgacaaaatctccttggagagacagaacaaggacctgaagacccggttggccagctcagaaggcttccagaagcctagtgccagcctctctcagcttgagtcccagaatcagttgttgcaggagcggctacaggctgaagagagggagaagacagttctgcagtctaccaatcgaaaactggagcggaaagttaaagaactatccatccagattgaagacgagcggcagcatgtcaatgaccagaaagaccagctaagcctgagggtgaaggctttgaagcgtcaggtggatgaagcagaagaggaaattgagcgactggacggcctgaggaagaaggcccagcgtgaggtggaggagcagcatgaggtcaatgaacagctccaggcccggatcaagtctctggagaaggactcctggcgcaaagcttcccgctcagctgctgagtcagctctcaaaaacgaagggctgagctcagatgaggaattcgacagtgtctacgatccctcgtccattgcatcactgcttacggagagcaacctacagaccagctcctgttagctcgtggtcctcaaggactcagaaaccaggctcgaggcctatcccagcaagtgctgctctgctctgcccaccctgggttctgcattcctatgggtgacccaattattcagacctaagacagggaggggtcagagtgatggtgataaaaaaaaaaaatcatcagcaataagctgatagatggactttccactgtaggagtggacatttcaagccaactgagccttttcctcaagtgccgacacctccctcatctctcttatagtggaaggatggtcagcattaggctgatggggactgagaaggataggaagggatagaaattgccatgtgtataaagctttattctttagcccttaaccctaaggctcagggaaataccctatgttattgtgctccctggattcctgcaactcattttccttccactctggagcagggtgaggggaatgttatgggtaacagacatgcaggcatggctctacccatttctttgcacaagtatggggcccatgtggtagtccccatacccctccagttcctatatttttgtcttcttcctttcccctctttgccattcctaccttgcatttttcctgtcagtgccttagccaaggcaaggagataaggatgctcttcttgctttttatatctgcacattcatacctctccaaagaccagcttttccccagccagggccctcagccttccctgctgccccagtgattgattgagagagctgttggggtttctctgccaatgacccctgggagagggactttggtagggtcatgataaagtggcgggggtctggtcctgctcagggttttcatccttcctcctctccctcctctgtgactgtggatatggttataaggtggttgcacctgggagccctgacaactggctgcacaaattccaaaagtaaaggtgtcagtccctgtggccttccttggggcttctctgaccacatgtgcccaacttcaataagagaaccaagggaccctcattttctgaggtgcttggctctgattcagggctttgcaaggggttagaagctgactgtaaaaatgggaagaggcaacggaagacatttatttctcctttggattttggggagaaccaagccctggtagggaagaggtaagggggatgattcacctccatatttcctaagcaggttgtatagggagccggtggcaggaggaaggctgttttcacaaatgacttgtaatgtcgtgattaaaaaaattcctatattcttctgcaaatcaaacgttctttcccaatccaatccagccttggttttattttaaattaaatattaaaattacacatttatattgaaa

SEQ ID NO: 140 - DNA, 614 bp, Homo Sapiens
gaaacagggtcgggatgccgatgccggcttggagttagagatgagtcaccgctgagagcagctgcagtagctgagcagtggcagcagagaggcagacgtgagctgagggcgcagaggcaggcagcatctctgagggtccccaaggaacatggctgggagccgtgaggtggtggccatggactgcgagatggtggggctggggccccaccgggagagtggcctggctcgttgcagcctcgtgaacgtccacggtgctgtgctgtacgacaagttcatccggcctgagggagagatcaccgattacagaacccgggtcagcggggtcacccctcagcacatggtgggggccacaccatttgccgtggccaggctagaggcactgaaagaggacatgagcggctacacaatctacgacacgtccactgacaggctgttgtggcgtgaggccaagctggaccactgcaggcgtgtctccctgcgggtgctgagtgagcgcctcctacacaagagcatccagaacagcctgcttggacacagctcggtggaagatgcgagggcaacgatggagctctatcaaatctcccagagaatccgagcccgccgagggctgcccc

SEQ ID NO: 141 - DNA, 2774 bp, Homo Sapiens
caatctgaggagcaggaggaccggggcgccggtgtcctgccgcctccttctccttgctctcacctgcgcctattagtccacgcgccttcaaggccaggggctacagcccagacagagaggggacagcagagggagagagagcacctgaggatacagagctggcactggactgccttttcaccccccaggtgatgagtgaggttcgaagaacggaagatttaaaaagcagccggggcctccgtattgaatgaaagacccagtgcaaagacatcaccatgaacactagcattccttatcagcagaatccttacaatccacggggcagctccaatgtcatccagtgctaccgctgtggagacacctgcaaaggggaagtggtccgcgtgcacaacaaccacttccacatcagatgcttcacctgtcaagtatgtggctgtggcctggcccagtcaggcttcttcttcaagaaccaggagtacatctgcacccaggactaccagcaactctatggcacccgctgtgacagctgccgggacttcatcacaggcgaagtcatctcggccctgggccgcacttaccaccccaagtgcttcgtgtgcagcttgtgcaggaagcctttccccattggagacaaggtgaccttcagcggtaaagaatgtgtgtgccaaacgtgctcccagtccatggccagcagtaagcccatcaagattcgtggaccaagccactgtgccgggtgcaaggaggagatcaagcacggccagtcactcctggctctggacaagcagtggcacgtcagctgcttcaagtgccagacctgcagcgtcatcctcaccggggagtatatcagcaaggatggtgttccatactgtgagtccgactaccatgcccagtttggcattaaatgtgagacttgtgaccgatacatcagtggcagagtcttggaggcaggagggaagcactaccacccaacctgtgccaggtgtgtacgctgccaccagatgttcaccgaaggagaggaaatgtacctcacaggttccgaggtttggcaccccatctgcaaacaggcagcccgggcagagaagaagttaaagcatagacggacatctgaaacctccatctcaccccctggatccagcattgggtcacccaaccgagtcatctgcgacatctacgagaacctggacctccggcagagacgggcctccagcccggggtacatagactcccccacctacagccggcagggcatgtcccccaccttctcccgctcacctcaccactactaccgctctggtgatttgtctacagcaaccaagagcaaaacaagtgaagacatcagccagacctccaagtacagtcccatctactcgccagacccctactatgcttcggagtctgagtactggacctaccatgggtcccccaaagtgccccgagccagaaggttctcgtctggaggagaggaggatgattttgaccgcagcatgcacaagctccaaagtggaattggccggctgattctgaaggaagaaatgaaggcccggtcgagctcctatgcagatccctggacccctccccggagctccaccagcagccgggaagccctgcacacagctggctatgagatgtccctcaatggctcccctcggtcgcactacctggctgacagtgatcctctcatctccaaatctgcctccctgcctgcctaccgaagaaatgggctgcacaggacacccagcgcagacctcttccactacgacagcatgaacgcagtcaactggggcatgcgagagtacaagatctacccttatgaactgctgctggtgactacaagaggaagaaaccgactgcccaaggatgtagacaggacccgtttagagggaaacttttggaagagtggctgcttatgagattccaaaatgaagtgttggccaacaccgctcatggccatcctggattttcccagtggcttcccttcctgctcgcctccctgaacaggggagaaagcttaacctctcttctcctctccaaacctttcaccttgaatgggtaatgtttggtgggggctgttccttcttggagaagccttgagtcggaccattttgagatcatggaggaaggatgaagaagtgaaaatgacaataatgactctcaagaggctggcgatgtgacatggcaaatgtagaactgacttaaattgaacaaaccctcactgagcacctctgatgttgagcacctgctgaatactgagcactgaatgggggagggggaggggagcacggggtgagtcaacctgggactcggtctcagggatatgcctaccaatagcgggtatcgtaaggcatgtacccaaacataacggatgtaaggcagaaagtgatcggagaaggaatgagaaagtgtgcgtgatgttaatgaaaagtcatatgcagctagagcagacccaggaaagctttctggaagagattgcatctgaggaaattcaggaaggatctttgtagattggggggagattctaaattgaaggggtgatggggtgaggggccagagggaagtctgctgtgttctcatgtaggatgtcagccctccctgcaacttctctttttggccaatgtcttttcactttcctgaccctttagaatcatccccagccagacgcaatcatggaagttgccttattgtcactggttaagaacttggcgagattgaagggcttttgttattgttgttggatatttttgtttcccataaaagcacatcatttcaaccctaaa

SEQ ID NO: 142 - DNA, 1017 bp, Homo Sapiens
agtgccccaggcggcgaggagagcggtgccttgcagggatgctgcgggcgggagcaccaaccggggacttaccccgggcgggagaagtccacaccgggaccaccatcatggcagtggagtttgacgggggcgttgtgatgggttctgattcccgagtgtctgcaggcgaggcggtggtgaaccgagtgtttgacaagctgtccccgctgcacgagcgcatctactgtgcactctctggttcagctgctgatgcccaagccgtggccgacatggccgcctaccagctggagctccatgggatagaactggaggaacctccacttgttttggctgctgcaaatgtggtgagaaatatcagctataaatatcgagaggacttgtctgcacatctcatggtagctggctgggaccaacgtgaaggaggtcaggtatatggaaccctgggaggaatgctgactcgacagccttttgccattggtggctccggcagcacctttatctatggttatgtggatgcagcatataagccaggcatgtctcccgaggagtgcaggcgcttcaccacagacgctattgctctggccatgagccgggatggctcaagcgggggtgtcatctacctggtcactattacagctgccggtgtggaccatcgagtcatcttgggcaatgaactgccaaaattctatgatgagtgaaccttccccagacttctctttcttattttgtaataaactctctagggccaaaacctggtatggtcattgggaaatgagtgctcagggagatggagcttaggggaggtgggtgcttccctcctagatgtcagcatacactctttcttcttttgtcccaggtctaaaacatctttcctagagaaaacaaaagggactaaactagaaatataaagagccctatacatgacaggtgatcacgtactgaatgattttgaagtagtacaaacaataaaaattctcattccgcatcatcatgcggtccatgatgatgaggccgcaa

SEQ ID NO: 143 - DNA, 3029 bp, Homo Sapiens
atcacagcccttccccgatcctctccgtgggagccagcgagcctctctccctgatcttacgtgctcaagaagctgttgtgaaggcagagcagcatctgctgaagagacagaaaccagccccagaggtgtcacaggaaggcaccagcaaggacattggtctttgatttgattcagcagtcctgtcaagtataaatgtgatggctgtgctgcctggccctctgcagctgctgggagtgctgcttaccatttccctgagttccatcaggctcattcaggctggtgcctactatgggatcaagccgctgccacctcaaattcctcctcagatgccaccacaaattccacaataccagcccctgggtcagcaagtacctcacatgcctttggccaaagatggccttgccatgggcaaggagatgccccacttgcagtatggcaaagagtatccacacctaccccaatatatgaaggaaattcaaccggcgccaagaatgggcaaggaagccgtacccaagaaaggcaaagaaataccattagccagtttacgaggggaacaaggtccccgtggagagcctggcccaagaggaccacctgggccccctggtttgccaggtcatgggatacctggaattaaaggaaaaccagggccacagggatatccaggagttggaaagccaggtatgcctggaatgccagggaagccaggagccatgggcatgcctggggcaaaaggagaaattggacagaaaggggaaattgggcctatggggatcccaggaccacaaggacctccagggcctcatggacttcctggcattgggaagccaggtgggccagggttaccagggcaaccaggaccaaagggtgatcgaggacccaaaggactaccaggacctcaaggccttcggggtcctaaaggagacaagggcttcgggatgccaggtgcgccaggtgtaaaggggcctccagggatgcacggccctcccggccctgttggactgccaggagtgggcaaaccaggagtgacaggcttccctgggccccagggccccctgggaaagccaggggctccaggagaacctgggccacaaggccctattggggtaccgggggttcaaggacctcctgggatacccggaattggaaagccaggccaggatgggatcccaggccagccaggatttccaggtggcaaaggggagcaaggactgccagggctaccaggacccccaggccttccagggattgggaaaccaggcttcccaggacccaaaggtgaccggggcatgggaggtgttcctggggctcttggaccaagaggggagaaaggaccaataggtgccccaggaatagggggtcctccaggagagccaggcctgcctggaatcccaggtcctatgggccctccaggtgctattggttttcctggacccaaaggagaaggtgggattgtagggccacaggggccaccaggtcccaagggtgagccagggcttcaaggcttcccaggaaagccaggtttccttggtgaagtagggcctcctggcatgaggggtttgccaggtcccatagggcccaagggggaagctgggcaaaaaggtgtaccaggactccctggtgttccagggcttctcggacctaagggagagccaggaatcccaggggatcagggtttacagggccccccaggtatcccagggattgggggccctagtggccccattggaccacctgggattccaggccccaaaggggagccgggcctcccagggccccctgggttccctggtatagggaaacccggagtggcaggacttcatggccccccagggaagcctggtgcccttggtcctcaaggccagcctggccttccaggacccccaggccctccaggacctccaggacccccagctgtgatgccccctacaccaccaccccagggagagtatctgccagatatggggctgggaattgatggcgtgaaacccccccatgcctacggggctaagaaaggcaagaatggagggccagcctatgagatgcctgcatttaccgccgagctaaccgcacctttcccaccggtgggggccccagtgaagtttaacaaactgctgtataacggcagacagaactacaacccgcagacaggcatcttcacctgtgaggtccctggtgtctactactttgcataccacgttcactgcaaggggggcaacgtgtgggttgctctattcaagaacaacgagcccgtgatgtacacgtacgacgagtacaaaaagggcttcctggaccaggcatctgggagtgcagtgctgctgctcaggcccggagaccgggtgttcctccagatgccctcagaacaggctgcaggactgtatgccgggcagtatgtccactcctccttttcaggatatttattgtatcccatgtaaaaacaaaaaaacaaaaaacaaagaaaagaaagagattttatagaagaaaatgacacaccaaaaaatccaaatgaaaaacataattgcttcaaaacacttacacagttggaaagttatatgtaagtgaaaatttggaccattgtgtacaaataaaaactaagatgcatgtttaatactccacacagcagcctgtaattgcgaatgatgggatagagttatgtatcaagtactgacacttggttgtacccactggaatcatattagctgttttatgttatatgcttccacagtaacctgcttattcagatcagtcaaaatatatcagtatgaaagatcatagctaatgaaaggcactcactcatattgtttactttaaaatatttataaatatgccttaaagaaatacaaatgataacaattacataccgtatttacttgcttaatttcctctgtatttgtgtagatactttgacatggaatatatggtggggagacccgtagtgttaccgccccagtgggagggggccctggggaccctggtaatgctttagtcaaagggatatctctcttgtatcagaggctgtgtcttttagtaac

SEQ ID NO: 144 - DNA, 1843 bp, Homo Sapiens
acctatgccgcgtggggcgggggctgcgggcgggggtgcgcggcgccggatgagcctcctggcctcgccgagggtgtacagggggtgggagagtcaggccggggaccgaaacttggctgagcagagcaccagcccctttgtctcctccgccccctcttccccacttcctgcccagctctggatcggcggcgcggcgcggactttgtaaacacttcgccactgcaggggtggagactggctctgttcggatgccggccgggggggagaggtgcaatcctctcctcgcggctggtggttgcgaccacccccactccccaaaggcaggctccggaggcggcgggacagagcgcctgcgaccccagtcggtgctccggggaggtcacctgacgaggaggactgggaggtgctggtcctagggaagctcaagtgggacctggctgctgtgattgcacatgatttcctggccttcattctgcaccggctctctctgccccgtgaccgacaggccttggtcaaaaagcatgcccagacctttttggccctctgtgctacagattatacctttgccatgtacccgccatccatgatcgccacgggcagcattggggctgcagtgcaaggcctgggtgcctgctccatgtccggggatgagctcacagagctgctggcagggatcactggcactgaagtggactgcctgcgggcctgtcaggagcagatcgaagctgcactcagggagagcctcagggaagcctctcagaccagctccagcccagcgcccaaagccccccggggctccagcagccaagggcccagccagaccagcactcctacagatgtcacagccatacacctgtagccctggagaggccctctggagtggccactaagcagaggaggggccgctgccacccacctccctgcctccaggaaccacaccacatctaagcctgaaggggcgtctgttcccccttcacaaagcccaagggatctggtcctacccatccccgcagtgtgcactaaggggcccggccagccatgtctgcatttcggtggctagtcaagctcctcctccctgcatctgaccagcagcgcctttcccaactctagctgggggtgggccaggctgatgggacagaattggatacatacaccagcattccttttgaacgcccccccccacccctgggggctctcatgttttcaactgccaaaatgctctagtgccttctaaaggtgttgtcccttctagggttattgcatttggattggggtccctctaaaatttaatgcatgatagacacatatgagggggaatagtctagatggctcctctcagtactttggaggcccctatgtagtccgtgctgacagctgctcctagagggaggggcctaggcctcagccagagaagctataaattcctctttgctttgctttctgctcagcttctcctgtgtgattgacagctttgctgctgaaggctcattttaatttattaattgctttgagcacaactttaagaggacataatggggtcctggccatcccacaagtggtggtaaccctggtggttgctgttttcctcccttctgctactggcaaaaggatctttgtggccaaggagctgctatagcctggggtggggtcatgccctcctctcccattgtccctctgccccatcctccagcagggaaaatgcagcagggatgccctggaggtggctgagcccctgtctagagagggaggcaagccctgttgacacaggtctttcctaaggctgcaaggtttaggctggtggcccaggaccatcatcctactgtaataaagatgattgtgaaat

SEQ ID NO: 145 - DNA, 926 bp, Homo Sapiens
ggttaaaaccgaaaataaaaatgggctagacacaaaggactcggtgcttgtcccagccaggcgccctcggcgacgcgggcagctgggaggggaatgggcgcccggacccagctgggacccccgggtgcgactccacctacctagtccggcgccaggccgggtcgacagctccggcagcgccagcgccgcgccgtgtccagatgtcgcgtcagaggcgtgcagcggtttagtttaatttcgcttgttttccaaatctagaagaggagcggagcggcttttagttcaaaactgacattcagcctcctgattggcggatagagcaatgagatgacctcgctttcctttcttcctttttcatttttaaataatctagtttgaagaatggaagactttcgacgaggggagccaggaataaaataaggggaataggggagcggggacgcgagcagcaccagaatccgcgggagcgcggctgttcctggtcatgatgatgggcagcgcccgagtggcggagctgctgctgctccacggcgcggagcccaactgcgccgaccccgccactctcacccgacccgtgcacgacgctgcccgggagggcttcctggacacgctggtggtgctgcaccgggccggggcgcggctggacgtgcgcgatgcctggggccgtctgcccgtggacctggctgaggagctgggccatcgcgatgtcgcacggtacctgcgcgcggctgcggggggcaccagaggcagtaaccatgcccgcatagatgccgcggaaggtccctcagacatccccgattgaaagaaccagagaggctctgagaaacctcgggaaacttagatcatcagtcaccgaaggtcctacagggccacaactgcccccgccacaacccaccccgctttcgtagttttcatttagaaaatag

SEQ ID NO: 146 - DNA, 2598 bp, Homo Sapiens
aggggcggagacgaccttgccgccggcgggaactctgggtctcgcggtttgggagcgctactcgccaggtggactcggagtccgcgagcgtcgtcggcaagcggccgcctttccacggtactccgagcactatgtcgtccccggcgtcgaccccgagccgccgcggcagccggcgtggaagggccacccccgcccagacgcctcggagtgaggatgccaggtcatctccctctcagagacgtagaggcgaggattccacctccacgggggagttgcagccgatgccaacctcgcctggagtggacctgcagagccctgctgcgcaggacgtgctgttttccagccctccccaaatgcattcttcagctatccctcttgactttgatgttagttcaccactgacatacggcactcccagctctcgggtagagggaaccccaagaagtggtgttaggggcacacctgtgagacagaggcctgacctgggctctgcacagaagggcctgcaagtggatctgcagtctgacggggcagcagcagaagatatagtggcaagtgagcagtctctaggccaaaaacttgtgatctggggaacagatgtaaatgtggcagcatgcaaagaaaactttcagagatttcttcagcgttttattgaccctctggctaaagaagaagaaaatgttggcatagatattactgaacctctatacatgcaacgacttggggagattaatgttattggtgagccatttttaaatgtgaactgtgaacacatcaaatcatttgacaaaaatttgtacagacaactcatctcttacccacaggaagttattccaacttttgacatggctgtcaatgaaatcttctttgaccgttaccctgactcaatcttagaacatcagattcaagtaagaccattcaacgcattgaagactaagaatatgagaaacctgaatccagaagacattgaccagctcatcaccatcagcggcatggtgatcaggacatcccagctgattcccgagatgcaggaggccttcttccagtgccaagtgtgtgcccacacgacccgggtggagatggaccgcggccgcattgcagagcccagtgtgtgcgggcgctgccacaccacccacagcatggcactcatccacaaccgctccctcttctctgacaagcagatgatcaagcttcaggagtctccggaagacatgcctgcagggcagacaccacacacagttatcctgtttgctcacaatgatctcgttgacaaggtccagcctggggacagagtgaatgttacaggcatctatcgagctgtgcctattcgagtcaatccaagagtgagtaatgtgaagtctgtctacaaaacccacattgatgtcattcattatcggaaaacggatgcaaaacgtctgcatggccttgatgaagaagcagaacagaaacttttttcagagaaacgtgtggaattgcttaaggaactttccaggaaaccagacatttatgagaggcttgcttcagccttggctccaagcatttatgaacatgaagatataaagaagggaattttgcttcagctctttggcgggacaaggaaggattttagtcacactggaaggggcaaatttcgggctgagatcaacatcttgctgtgtggcgaccctggtaccagcaagtcccagctgctgcagtacgtgtacaacctcgtccccaggggccagtacacgtctgggaagggctccagtgcagttggcctcactgcgtacgtaatgaaagaccctgagacaaggcagctggtcctgcagacaggtgctcttgtcctgagtgacaacggcatctgctgtatcgatgagttcgacaagatgaatgaaagtacaagatcggtattgcatgaagtcatggaacagcagactctgtccattgcaaaggctgggatcatctgtcagctcaatgcgcgcacctctgtcctggcagcagcaaatcccattgagtctcagtggaatcctaaaaaaacaaccattgaaaacatccagctgcctcatactttattatcaaggtttgatttgatcttcctcttgctggaccctcaggacgaagcctatgacaggcgtctggctcaccacctggtcgcactgtactaccagagcgaggagcaggcagaggaggagctcctggacatggcggtgctaaaggactacattgcctacgcgcacagcaccatcatgccgcggctaagtgaggaagccagccaggctctcatcgaggcaattactaaagatatgtttgaagaagcactgcgtgccctggcagatgatgatttcctgacagtgactgggaagaccgtgcgcttgctctgaagccttgtgagcaaggaaggctccctgcatgtcctgcttgctgcacgccacatgggtgtggtctgcatctcagttggccgccatcagtgtaaatagagcttaaagtcatggtttggctgcataaaaattttctaacttgggttcaatatttgtagtgaagtatctgttttcatttttttcacgttataaataaaaatactatgctggccgggcgcggtggctcacacctgtaatccca

SEQ ID NO: 147 - DNA, 890 bp, Homo Sapiens
tttcggacggtcttggaattagtcataaactaccagcaactctgcatctactggacaaagtattatgactttaaaaaccccattattgaaaagtacctgagaaggcagctcacgaaacccaggcctgtgatcctggacccggcggaccctacaggaaacttgggtggtggagacccaaagggttggaggcagctggcacaagaggctgaggcctggctgaattacccatgctttaagaattgggatgggtccccagtgagctcctggattctgctgatgagacaaaggctcagagaggtgaggtcacttgctcaaggacatcagctaacaagtggtggaaatggaattcaagctcagtggactctaaagccagtgctcatgtcactgtgctaaacagcctgccttgtcacatccccacctctcatctgaccaatgggagactctgagcagctgagtgacttgggttgtcacacagctaaacaggggcaaaggacccagtcttggatctttccacctccaagcaggaatctgtctgattccaggggattgatgatgttgcagatggctaggaagcagactccaggatggaatttagtatgcaggatgttctgggggagagccactggaaccagcactcagggaaaggggggaagaaaggataggaaggaagcatgaaagagaatagggagaagtgaacagggatgcagagcgaatgccagtttcagccaactccaaggacagccctggagctggaatggcctttagagctgccccatggtgacagaggtggccaggcttctatacccctacgtggatcactcactgtgcttgggcaccttgggaaagggcatggctttgagcaaaaggctctctgcagctgaggcaacccc

SEQ ID NO: 148 - DNA, 860 bp, Homo Sapiens
ttctcgcgagagttgagcgcgcctggccggacgggaggaaagtatccgttccgccaaggggggaaaggaggagctggagacagattgtaggaccgagcgcgggcaggcgggaggcaacggagctaccagccgctcctctctgctatatgaaatatgggagacgacagaccgtttgtgtgcaatgccccgggctgtggacagagatttacaaacgaggaccacctggcagttcataaacacaagcatgagatgacattgaaatttggcccagcccgaactgactcagtcatcattgcagatcaaacgcctactccaactagattcctgaagaactgtgaggaggtgggactcttcaatgaactagctagctcctttgaacatgaattcaagaaagctgcagatgaggatgagaaaaaggcaagaagcaggactgttgccaaaaaactggtggtattcagacctaggctatttttattgtgctttgggataattttcttaattggttaaaacacaaaatcatgggcttagtagagtaaaaccagtaaaaccagatagtagtcactaatcccagtcagccattcaggtctttaggagttccagatgatggatcagcacaagtctgtcgtcaccgaaaattagtcctcttgttcttccaggggagtattagtttaataatcggttttttaaaaaatatttatattataaatatgttgaagatgttaaaaggtgataaattactcagattttgttggataacatatttgttgccaaattccactcttttctgagctgatcagacttctcagctacactgtttttttgaatcagcaagtcaataaacatttatcaaatttccactc

SEQ ID NO: 149 - DNA, 1581 bp, Homo Sapiens
aaaatccactactccagacagacggctttggaatccaccagctacatccagctccctgagagttgagaatggagagaatgttacctctcctggctctggggctcttggcggctgggttctgccctgctgtcctctgccaccctaacagcccacttgacgaggagaatctgacccaggagaaccaagaccgagggacacacgtggacctcggattagcctccgccaacgtggacttcgctttcagcctgtacaagcagttagtcctgaaggcccctgataagaatgtcatcttctccccactgagcatctccaccgccttggccttcctgtctctgggggcccataataccaccctgacagagattctcaaaggcctcaagttcaacctcacggagacttctgaggcagaaattcaccagagcttccagcacctcctgcgcaccctcaatcagtccagcgatgagctgcagctgagtatgggaaatgccatgtttgtcaaagagcaactcagtctgctggacaggttcacggaggatgccaagaggctgtatggctccgaggcctttgccactgactttcaggactcagctgcagctaagaagctcatcaacgactacgtgaagaatggaactagggggaaaatcacagatctgatcaaggaccttgactcgcagacaatgatggtcctggtgaattacatcttctttaaagccaaatgggagatgccctttgacccccaagatactcatcagtcaaggttctacttgagcaagaaaaagtgggtaatggtgcccatgatgagtttgcatcacctgactataccttacttccgggacgaggagctgtcctgcaccgtggtggagctgaagtacacaggcaatgccagcgcactcttcatcctccctgatcaagacaagatggaggaagtggaagccatgctgctcccagagaccctgaagcggtggagagactctctggagttcagagagataggtgagctctacctgccaaagttttccatctcgagggactataacctgaacgacatacttctccagctgggcattgaggaagccttcaccagcaaggctgacctgtcagggatcacaggggccaggaacctagcagtctcccaggtggtccataaggctgtgcttgatgtatttgaggagggcacagaagcatctgctgccacagcagtcaaaatcaccctcctttctgcattagtggagacaaggaccattgtgcgtttcaacaggcccttcctgatgatcattgtccctacagacacccagaacatcttcttcatgagcaaagtcaccaatcccaagcaagcctagagcttgccatcaagcagtggggctctcagtaaggaacttggaatgcaagctggatgcctgggtctctgggcacagcctggcccctgtgcaccgagtggccatggcatgtgtggccctgtctgcttatccttggaaggtgacagcgattccctgtgtagctctcacatgcacaggggcccatggactcttcagtctggagggtcctgggcctcctgacagcaataaataatttcgttggaca

SEQ ID NO: 150 - DNA, 756 bp, Homo Sapiens
gacagccgctgcggcagcactcgagccagctcaagcccgcagctcgcagggagatccagctccgtcctgcctgcagcagcacaaccctgcacacccaccatggatgtcttcaagaagggcttctccatcgccaaggagggcgtggtgggtgcggtggaaaagaccaagcagggggtgacggaagcagctgagaagaccaaggagggggtcatgtatgtgggagccaagaccaaggagaatgttgtacagagcgtgacctcagtggccgagaagaccaaggagcaggccaacgccgtgagcgaggctgtggtgagcagcgtcaacactgtggccaccaagaccgtggaggaggcggagaacatcgcggtcacctccggggtggtgcgcaaggaggacttgaggccatctgccccccaacaggagggtgaggcatccaaagagaaagaggaagtggcagaggaggcccagagtgggggagactagagggctacaggccagcgtggatgacctgaagagcgctcctctgccttggacaccatcccctcctagcacaaggagtgcccgccttgagtgacatgcggctgcccacgctcctgccctcgtctccctggccacccttggcctgtccacctgtgctgctgcaccaacctcactgccctccctcggccccacccaccctctggtccttctgaccccacttatgctgctgtgaattttttttttaaatgattccaaataaaacttgagcccactcct

SEQ ID NO: 151 - DNA, 1279 bp, Homo Sapiens
gtgactccgcggccgggccgggacgcgacgggacgcgctgggaccggcgtcgggggtcgcggggaccatgcagcggaggtgggtcttcgtgctgctcgacgtgctgtgcttactggtcgcctccctgcccttcgctatcctgacgctggtgaacgccccgtacaagcgaggattttactgcggggatgactccatccggtacccctaccgtccagataccatcacccacgggctcatggctggggtcaccatcacggccaccgtcatccttgtctcggccggggaagcctacctggtgtacacagaccggctctattctcgctcggacttcaacaactacgtggctgctgtatacaaggtgctggggaccttcctgtttggggctgccgtgagccagtctctgacagacctggccaagtacatgattgggcgtctgaggcccaacttcctagccgtctgcgaccccgactggagccgggtcaactgctcggtctatgtgcagctggagaaggtgtgcaggggaaaccctgctgatgtcaccgaggccaggttgtctttctactcgggacactcttcctttgggatgtactgcatggtgttcttggcgctgtatgtgcaggcacgactctgttggaagtgggcacggctgctgcgacccacagtccagttcttcctggtggcctttgccctctacgtgggctacacccgcgtgtctgattacaaacaccactggagcgatgtccttgttggcctcctgcagggggcactggtggctgccctcactgtctgctacatctcagacttcttcaaagcccgacccccacagcactgtctgaaggaggaggagctggaacggaagcccagcctgtcactgacgttgaccctgggcgaggctgaccacaaccactatggatacccgcactcctcctcctgaggccggaccccgcccaggcagggagctgctgtgagtccagctgaggcccacccaggtggtccctccagccctggttaggcactgagggctctggacgggctccaggaaccctgggctgatgggagcagtgagcgggctccgctgccccctgccctgcactggaccaggagtctggagatgcctgggtagccctcagcatttggaggggaacctgttcccgtcggtccccaaatatccccttctttttatggggttaaggaagggaccgagagatcagatagttgctgttttgtaaaatgtaatgtatatgtggtttttagtaaaatagggcacctgtttcacaaa

SEQ ID NO: 152 - DNA, 2003 bp, Homo Sapiens
cattttcctggggctccggggcgcggagaagctgcatcccagaggagcgcgtccaggagcggacccgggagtgtttcaagagccagtgacaaggaccaggggcccaagtcccaccagccatgcagacctgccccctggcattccctggccacgtttcccaggcccttgggaccctcctgtttttggctgcctccttgagtgctcagaatgaaggctgggacagccccatctgcacagagggggtagtctctgtgtcttggggcgagaacaccgtcatgtcctgcaacatctccaacgccttctcccatgtcaacatcaagctgcgtgcccacgggcaggagagcgccatcttcaatgaggtggctccaggctacttctcccgggacggctggcagctccaggttcagggaggcgtggcacagctggtgatcaaaggcgcccgggactcccatgctgggctgtacatgtggcacctcgtgggacaccagagaaataacagacaagtcacgctggaggtttcaggtgcagaaccccagtccgcccccgacactgggttctggcctgtgccagcggtggtcactgctgtcttcatcctcttggtcgctctggtcatgttcgcctggtacaggtgccgctgttcccagcaacgccgggagaagaagttcttcctcctagaaccccagatgaaggtcgcagccctcagagcgggagcccagcagggcctgagcagagcctccgctgaactgtggaccccagactccgagcccaccccaaggccgctggcactggtgttcaaaccctcaccacttggagccctggagctgctgtccccccaacccttgtttccatatgccgcagacccatagccgcctgcaaggcagagaggacacaggagagccagccctgagtgccgaccttgggtggcggggcctgggtctctcgtcccacccggagggcacagacaccggcttgcttggcaggctgggcctctgtgtcacccactcctgggtgcgtgcagacccttcccctccaccccccaggtcttccaagctctgcttcctcagtttccaaaatggaaccacctcacctccgcagcacccgacttaccaggacgcatgcccctccctctgccctcatcaaacccacagacccggactccctttctgccaccccaggctggtccggccccaggtgtggggtccgctctctccactcccagggctccgcgcccaagtgagggggcccctgccggagcctcagacacactccagttcagggctgtggggggccttggccacatacctgtcccttggctatgagcaggctttgggggcccttccgcggcagccccgggggccgaggtagggtcgggggcttagaggctgggatggctcctggccccaccgccagggggcagcgcaggccgggctgggaggcggcggcggcggctcgggctggggggtcaggtggacgccgccctccggggctggacgcgcatccctcagtccctcggccacccgggggtcgctccctcgtgcccaccgcacctgccgagcctctttggacccagatctgttcatgcttttgtcttcgtcactgcggcggggccctttgatgtcttcatctgtatggggtggaaaaatcaccgggaatcccccttcagttctttgaaaaagttccatgactcgaatatctgaaatgaagaaaacaaaccgactcacaaacctccaagtagctccaaatgcaatttttaaaatggaaaacaaaaatctgaaagaaacgtctttagtggctttaagccccaaaacgtccctaaggcgtcctcgagatgaagacgggggggagcccccagccaggtggagaccccgcagggacgcggcggcgcccggtgaccgaggcctcgcacagccggccgccctgagggtcgggccggagccagggtccaagaggggcgcgtttgtgtctcgggttaaaataaggttccgtccgcgtgctgggtcaga

SEQ ID NO: 153 - DNA, 1200 bp, Homo Sapiens
agtcccagctcagagccgcaacctgcacagccatgcccgggcaagaactcaggacggtgaatggctctcagatgctcctggtgttgctggtgctctcgtggctgccgcatgggggcgccctgtctctggccgaggcgagccgcgcaagtttcccgggaccctcagagttgcactccgaagactccagattccgagagttgcggaaacgctacgaggacctgctaaccaggctgcgggccaaccagagctgggaagattcgaacaccgacctcgtcccggcccctgcagtccggatactcacgccagaagtgcggctgggatccggcggccacctgcacctgcgtatctctcgggccgcccttcccgaggggctccccgaggcctcccgccttcaccgggctctgttccggctgtccccgacggcgtcaaggtcgtgggacgtgacacgaccgctgcggcgtcagctcagccttgcaagaccccaggcgcccgcgctgcacctgcgactgtcgccgccgccgtcgcagtcggaccaactgctggcagaatcttcgtccgcacggccccagctggagttgcacttgcggccgcaagccgccagggggcgccgcagagcgcgtgcgcgcaacggggaccactgtccgctcgggcccgggcgttgctgccgtctgcacacggtccgcgcgtcgctggaagacctgggctgggccgattgggtgctgtcgccacgggaggtgcaagtgaccatgtgcatcggcgcgtgcccgagccagttccgggcggcaaacatgcacgcgcagatcaagacgagcctgcaccgcctgaagcccgacacggtgccagcgccctgctgcgtgcccgccagctacaatcccatggtgctcattcaaaagaccgacaccggggtgtcgctccagacctatgatgacttgttagccaaagactgccactgcatatgagcagtcctggtccttccactgtgcacctgcgcggaggacgcgacctcagttgtcctgccctgtggaatgggctcaaggttcctgagacacccgattcctgcccaaacagctgtatttatataagtctgttatttattattaatttattggggtgaccttcttggggactcgggggctggtctgatggaactgtgtatttatttaaaactctggtgataaaaataaagctgtctgaactgtt

SEQ ID NO: 154 - DNA, 3172 bp, Homo Sapiens
actgcactgctggctgcagacacaggctgcaccatgaagccagccctcctgccctgggccctgctgctgctggcgacagccctcggcccgggccccggacccacagcagatgcccaagagagctgctccatgcgctgtggcgccctggacgggccatgttcctgccacccgacgtgctctggccttggcacctgctgcttggatttccgggacttctgcctggagatattgccctactcaggatccatgatgggcggcaaggactttgtggtgcggcacttcaagatgtccagccccacagacgccagtgtgatctgcaggtttaaggacagcatccagaccctcggccatgtggactcctccgggcaagtgcactgtgtgtcacctctgctctatgagagcggccgcatccccttcactgtgtcactggacaacggccactccttccctcgtgcgggcacctggctggctgtgcaccccaacaaagtgtcaatgatggagaagagcgagttggtgaacgagacgcgttggcaatactacggcaccgccaacacctcaggcaacctcagcctgacctggcatgtcaagtcgctgcccacgcagaccatcaccatcgaactgtggggctacgaggagacaggaatgccctactcacaggagtggactgcaaagtggtcgtacctgtaccccctggccacacacatccccaactccggctctttcactttcaccccaaaacctgctcctcccagctaccagagatggcgagtgggtgcacttcggatcatcgacagcaaaaattacgcagggcagaaggacgtgcaggcgctctggaccaacgaccacgcactggcctggcacctgagcgatgacttccgagaggaccctgtggcctgggcacgaactcagtgccaggcctgggaggagctggaggatcagctgcccaacttcctggaggagctgccggactgcccctgcaccctgacccaggcccgggctgactccggccgcttcttcacggactacggctgtgacatggagcagggcagcgtgtgcacctaccaccccggggccgtgcactgtgtgcgttctgtgcaggccagcctccggtacggctcaggtcagcagtgctgctacacagcggacgggacgcagctcctgacagctgactccagcggcggcagcactcccgaccgcggccatgactggggcgcacccccgttccgcacgccaccccgagtgcccagcatgtcccactggctctacgatgtcctcagcttctattactgctgcctctgggcacccgactgcccccgctacatgcaacggcggccctccaatgactgccgcaactaccggcccccaagactggcctccgccttcggagacccacactttgtgaccttcgacggcaccaacttcacattcaatgggcgcggagagtacgtgctgctggaggcagcgctgaccgacctgagggtgcaggcgcgggcccagcccgggacgatgtccaacggcacggagacccgtggcactgggctgaccgcagtggccgtccaggagggcaactcagatgtggtggaagtcaggctggccaacaggaccggaggtctggaggtgctgctgaaccaggaggtgctgagcttcaccgagcagagctggatggacctgaaaggaatgttcctgtcggtggctgccggggacagggtctccatcatgctggcatcaggggccggcctggaggtcagcgtgcagggcccgttcctgagtgtgtccgtcctgctgcctgagaagttcctcacccacacccacggcctcctcgggacactcaacaacgaccccaccgacgacttcaccctgcacagcgggcgcgtcctgcccccaggcaccagtccccaggagctgttcctgtttggggccaactggaccgtgcacaatgcgtcctccctgctcacctacgattcctggttcctggtccacaacttcctgtaccaacccaagcacgaccccaccttcgagcccctcttccccagtgagaccaccctcaaccccagcctggcacaagaggcagccaaactatgtggggacgatcatttctgcaactttgatgtggcagccactgggagcctgagcacgggcactgccactcgggtggcccaccagctgcaccagcgtcgcatgcagagcctgcagccagtggtgtcctgtggctggctggccccacctcccaacggacaaaaggagggcaacaggtacctggcgggttccaccatctacttccactgtgacaacggctacagcctggccggggcagagaccagcacctgccaggctgacggcacctggtcctcacccaccccgaagtgccagccaggacgcagctacgcggtgctgttgggcatcatctttgggggcctcgcggtggtggcggcggttgcgctcgtctatgtgctgctgcgccgcaggaagggcaacacgcacgtctggggtgcacagccctgatgggagcagcttggctgtgagcaccaggccaagactcctgagaacaggcagcccagtcctgcgactcccgcatccccaggaccagacacctgggacctggatacttgatacctgggcatttaaccccctactctgtcatctcagaccccaggcaggaggcccagtgttccaacacccaagccccgtgctagcagcgctccgtgctcttccccaaatactcacggctctaattccccaaacctgaaacttcataccctgggattctaatacctatgtcctgagccctgacactcccacacctgagcctcagattccaatagctcactccctagagcctgacgccggggcccctgacccctgagcctcagattccaatacctcactccccagagcctgatgccggggcccctgacccctgatctacggaggcctgctcccggaccgtgcgggcaccagtgcagtgctgccttggttcctggacccctgggcccatcctgggaccccagatggggtaaggagaggccccagaaccccaaagcagacagcgagacccccagcggcagaggcctccctcggcactccaggcttataatttcgaactcttctggaaggtcactcaggaacaccctccctgcctgtgcaaagagaaaacaagcgccttgtttccttc

SEQ ID NO: 155 - DNA, 1897 bp, Homo Sapiens
gctttgaccgggtcgtggcagccggagtcgtcttcgggacgcgcctgctcttcgcctttcgctgcagtccgtcgatttctttctccaggaagaaaaatggcatccgttgcagttgatccacaaccgagtgtggtgactcgggtggtcaacctgcccttggtgagctccacgtatgacctcatgtcctcagcctatctcagtacaaaggaccagtatccctacctgaagtctgtgtgtgagatggcagagaacggtgtgaagaccatcacctccgtggccatgaccagtgctctgcccatcatccagaagctagagccgcaaattgcagttgccaatacctatgcctgtaaggggctagacaggattgaggagagactgcctattctgaatcagccatcaactcagattgttgccaatgccaaaggcgctgtgactggggcaaaagatgctgtgacgactactgtgactggggccaaggattctgtggccagcacgatcacaggggtgatggacaagaccaaaggggcagtgactggcagtgtggagaagaccaagtctgtggtcagtggcagcattaacacagtcttggggagtcggatgatgcagctcgtgagcagtggcgtagaaaatgcactcaccaaatcagagctgttggtagaacagtacctccctctcactgaggaagaactagaaaaagaagcaaaaaaagttgaaggatttgatctggttcagaagccaagttattatgttagactgggatccctgtctaccaagcttcactcccgtgcctaccagcaggctctcagcagggttaaagaagctaagcaaaaaagccaacagaccatttctcagctccattctactgttcacctgattgaatttgccaggaagaatgtgtatagtgccaatcagaaaattcaggatgctcaggataagctctacctctcatgggtagagtggaaaaggagcattggatatgatgatactgatgagtcccactgtgctgagcacattgagtcacgtactcttgcaattgcccgcaacctgactcagcagctccagaccacgtgccacaccctcctgtccaacatccaaggtgtaccacagaacatccaagatcaagccaagcacatgggggtgatggcaggcgacatctactcagtgttccgcaatgctgcctcctttaaagaagtgtctgacagcctcctcacttctagcaaggggcagctgcagaaaatgaaggaatctttagatgacgtgatggattatcttgttaacaacacgcccctcaactggctggtaggtcccttttatcctcagctgactgagtctcagaatgctcaggaccaaggtgcagagatggacaagagcagccaggagacccagcgatctgagcataaaactcattaaacctgcccctatcactagtgcatgctgtggccagacagatgacaccttttgttatgttgaaattaacttgctaggcaaccctaaattgggaagcaagtagctagtataaaggccctcaattgtagttgtttccagctgaattaagagctttaaagtttctggcattagcagatgatttctgttcacctggtaagaaaagaatgataggcttgtcagagcctatagccagaactcagaaaaaattcaaatgcacttatgttctcattctatggccattgtgttgcctctgttactgtttgtattgaataaaaacatcttcatgtgggctggggtagaaactggtgtctgctctggtgtgatctgaaaaggcgtcttcactgctttatctcatgatgcttgcttgtaaaacttgattttagtttttcatttctcaaataggaatactacctttgaattcaataaaattcactgcaggatagaccagtta

SEQ ID NO: 156 - DNA, 3377 bp, Homo Sapiens
agaaaactgaaaaagaggaatctacagaagttttaaaagctcagtcagcagggacagtcagaagtgctgctccaccccaagagaagaaaagaaaggtggagaaggatacaatgagtgatcaagcactcgaggctctgtcggcttcactgggcacccggcaagcagaacctgagctcgacctccgctcaattaaggaagtcgatgaggcaaaagctaaagaagaaaaactagagaagtgtggtgaggatgatgaaacaatcccatctgagtacagattaaaaccagccacggataaagatggaaaaccactattgccagagcctgaagaaaaacccaagcctcggagtgaatcagaactcattgatgaactttcagaagattttgaccggtctgaatgtaaagagaaaccatctaagccaactgaaaagacagaagaatctaaggccgctgctccagctcctgtgtcggaggctgtgtgtcggacctccatgtgtagtatacagtcagcaccccctgagccggctaccttgaagggcacagtgccagatgatgctgtagaagccttggctgatagcctggggaaaaaggaagcagatccagaagatggaaaacctgtgatggataaagtcaaggagaaggccaaagaagaagaccgtgaaaagcttggtgaaaaagaagaaacaattcctcctgattatagattagaagaggtcaaggataaagatggaaagccactcctgccaaaagagtctaaggaacagcttccacccatgagtgaagacttccttctggatgctttgtctgaggacttctctggtccacaaaatgcttcatctcttaaatttgaagatgctaaacttgctgctgccatctctgaagtggtttcccaaaccccagcttcaacgacccaagctggagccccaccccgtgatacctcgcagagtgacaaagacctcgatgatgccttggataaactctctgacagtctaggacaaaggcagcctgacccagatgagaacaaaccaatggaagataaagtaaaggaaaaagctaaagctgaacatagagacaagcttggagaaagagatgacactatcccacctgaatacagacatctcctggatgataatggacaggacaaaccagtgaagccacctacaaagaaatcagaggattcaaagaaacctgcagatgaccaagaccccattgatgctctctcaggagatctggacagctgtccctccactacagaaacctcacagaacacagcaaagacaacagaggaaacttccaagccaaaagatgactaaagaaatacaagttaaggtatctggtatctgcatgtaaaatcttcagctggtggatggtgacttttgaagaacaaaaggctttggcaacagaaaacaattgttctgggtgatttctagaatggtttttgttgagtctctgaacatcctaaatattggtttgttattcttttccagaaagaaaatgaatttgactggttcacctgtgtactgagtattgataaactttgaatttttttaattgccttcaattgggagagaaagctttatatttgtaagaaatatatttgataaagtttcttaaagcaacaccaaaaaaacaaaagaaaagctaagtgaatttttgcacattctacacacagtgcctgtaaatctcatttgtattttcagtttgcccttaattttttttgttagtgtttagaaaacaatgttttaaacattcttcagtgttctgatttcttattaccccctttcctcttgggcttttgaactgtatttgatgttgctttgggataatgtttataagtcaaacataagatattgtacattgggcacatatctcctcttgggctgctaataataaattaataacaggtaacctggacaaaccaggaagcaccaaaccccttttcagtttgaactcttctttgccaggtgtgaggacttctgcatcttacagtcagcacagaacacactgagacttgaatcaagtcagcaacagagcaaaataaaggttagataagtccttgtgtagcaaatttcgagcataagaaataaaatctaattaattcttagggtactcatctgacttgaactctgttggtttactgtgttagtaaactgtgctttctattatctatacataaaacctgagcagcaactgtgtctttagagctattgccacattagcctttgcactgtatagcgtctggctttatggaacttaagtttaccaaatataaaaagaaacttctgcttttaaaaaaattatatatatatattaaatttgaaacctgcatttctcccacagcaatgtaagaagtaggctctgatgtcctaccactttgaatggttttctaatatcttaatgaatagttcctgaacattgcactgatatcatcgattagaattttgatatttaatttcatctttatttcctggtagagaatgcaggaaaagatgtcaggtacataacataaaacagattgggaatttattgtttccaaagggcatggccttccttagcatcagtttgaagcttttgttatgacttagctgacttgtggcagcggggcaagcaaaaacaataacactgcttataaatggcaccacatcttgttaacctcccccccaaatactctctgaaagtcatgcacatacctatgggattttacacaccaccagcttaaaatgctatgtctctatccatcagaaatagtcattattctatttttaaggcagcaacaagaaaagaaaaaacacttttcctgagggatttctaaccatgtatctaatcctcccatttgggcagtataggtgtttgcttttttgttttctttttttaagaaaaaccttgaaacctttgacactgacagatgtgtttgcaaggatacggcttcagtattactaatttccatgtgtatctggaagtatttttaaatggcataccaaaatccagaagtttaaagatgcctataaaagtaaacaacatttatttaaaaagaactctgaatatgccttcttttttaattagaaatatcttcgagacttgggtgtttgttaataactaataactggagtaagctacaggatctaaagcagccctttttacagtctagttaggagagagaaaataattgcaaatatccacttagaggcaaagaacaattttttattatcaaaaaggtttctgcacattgttgtggcaatattgtatctgtttagaaaatgggcttttccaaaagcaaacaaagataggttcctcaggtgaccaaaactgaaaatcaatatttccatgtttcattaatcaaggcataaaatacaattaaagcaaaatattttacattaaaa

SEQ ID NO: 157 - DNA, 5692 bp, Homo Sapiens
gcaaaacttccatcctgtccacgtgaagttgtcgctgccttagagagggggaaagagctgcgggaaaagccggggagtgacgactgcggcggctgggcgcgctctctcattttcttttcttctcctttcccccctgtcgcagtccggagttttggctcctctcctttcctcctccccctcggagccggcttctccctccgccccgcttctcccccgcttgtgtacgctatttgttgtggggtggccgaaggggatgtcctgttttcaccagaggcacagcgcgaaggggaaacttcgacactggaaggaacgagaataaatacttaattacggacgcactgaaccgcggctgggacagacacttcgggaacccgaggcggaccgggcgacgagatagtcatttttacttgaaggaagctgcttctacttgggagtggcaggagaagtgagaaaaccacatggaagactcccaggatttaaatgaacaatcagtaaagaaaacgtgcacagaatcagatgtttcacaatctcagaattccaggtctatggaaatgcaggacctagcaagtcctcatactcttgttggaggtggtgatactccaggtagctccaaactggaaaaatctaatctcagcagcacatcagttactacaaatgggacaggaggggaaaacatgactgttttaaacacagcagactggttgctgagttgcaacaccccctcttctgcaacaatgtctcttcttgcagtcaaaacagagcccttgaacagcagtgaaaccacagccacgactggagatggagcgcttgacacttttactgggtcagtaattacaagtagtggctacagccccagatcagcacatcagtattccccacagctgtatccttccaagccctatccacacattctttctacaccagcagctcaaacaatgtctgcctatgcaggccagactcagtattcggggatgcagcagccagccgtctacacagcctactcacagacaggacagccctacagcttgcccacttacgatttgggtgtgatgttgccagccatcaagacagagagtggactttcccaaactcagtccccattacagagtggctgcctcagttacagcccagggttctctaccccacagccaggccagacaccttattcttaccaaatgccaggttctagttttgcaccatcatctactatttatgcaaataattcagtttccaattcaacgaatttcagtggttcacaacaggattatccatcctatacagcctttggccaaaaccagtatgcacagtattattcagcatcaacgtatggagcgtatatgacatcgaataacacagccgatggcacaccctcttcaacctctacttatcagttgcaggaatctctcccaggactgactaaccaaccaggagagttcgataccatgcagagtccctccacacccatcaaagatcttgatgagagaacctgtaggagttctgggtcaaagtccagaggaagaggccggaaaaataatccctccccgcctcctgatagtgacctggagcgtgtgtttgtctgggatttggatgaaaccatcattgtttttcactcactgctcaccgggtcttatgcacagaagtatggcaaggatccccccatggctgtaacccttggactccgcatggaagaaatgatttttaatcttgctgatactcatttgttttttaatgatttagaggagtgtgatcaagttcatatagatgatgtttcctctgatgataatgggcaggacttaagtacctacagttttgcaactgatggcttccatgcagctgcaagtagtgcaaacctttgtttgccaacaggtgtaagaggaggggttgactggatgaggaagttggcttttcgttacagaagagtaaaagaattatataacacctacaagaacaacgttggaggactccttggccctgccaagagggatgcctggctacagttaagggcagagattgaaggtctgacagattcctggctaacaaatgcacttaagtctttatcaattattagcactaggagtaactgcataaatgtcttggtaacgacaactcaactgatcccagcacttgcgaaggttctactctatagtttaggaggtgctttccccattgagaatatttacagtgcaactaaaataggcaaggaaagctgttttgagcgtatagtgtccagatttggcactaacataacttatgttgtgattggagatggccgagatgaggagcatgccgctaaccagcacaacatgcccttctggaggatatccagtcactcagacctcctggctctccaccaagcactggaattagagtatttgtaactgtgttctttagccggagatccattttttatatttcaagtacactgaatttttatgtgtgattcaatgcctctggctctacacatataaattgtcttaatggatgaaatcatatttggaataaaaattccagaatgaagaattcagattgctgaatggagttaaactttagtgctacagaaaagaaactctatggtcttatatttacaacactttaatgggttttttaaaaatctgtggaggttgctggtacacaccaaatgagtccaaactggaatgagcagctttagcaaagaactcttaccctggcaaagcagcaacacacatgctccgtctgacaaggtggtcaacaacattcctcaaaatgggagatcttctcagccctgaggtttgaatctgactttagcctacctaacccagaaaatctgaattggaatgcactcagactgtataaggacagtcctatttagacatgtaatttgtgtaaattattgatgaaaataatttactgtgactttattagcagctgactttcaaagtggatgcaatttttctttcttttgttggggaggggaatgggaggggaaatgggaatataatattgtctcttttttaagtttggcaaacagaatgttcatactgatgtgttgtgccttaaagacaagacagcatttgtgtgttacaatgtaactttggttaaaatctctgtagataatgaaaaaaaacaaaaaaaaaaacctttgtgatgattcttaacatgaccaaatttaaaagtcaagctctcagagcttaattaccgcatcagcaagaaactgagtattttttgcaataagaaaacaacaataataaaggaaagcttgtgtttcatttgggttcttaataattccaataattgtatgaggcaactatttgcgcatccaaccatgagtggaaggtttgggaaagactgtgggacctttacttagaaagtgaaatgtatgtagaagtctcaagtaccccttctacagttttactggagaaaactaagagccatattcatgacaacttgcacagttttgaggttgagacttttgatatgtgtaagttgcatagaggaggatattatcatgcaaatcatgagcaattatcacataaacttttttagaatgtgccatgaacatggcataaaattcacattgagtgcacagggcttaaaataaagctaagtatgtttattcccaatgccatggcaaaaatgataatatcatcagaaatggaaggcagttctcccagatggtgtctaatgaaagcaatgagtctatgaaaattttacctagaatatcatcataaattaaattagcaagtgcgctggatcttggcagcgctgctgaaatgacaacagtaaaataatacctggttctccatctgaatacatcaatgcaggttctcctcgtaacagacttgcatatgtttgttagtttctgcctgtattgtcactgcgcaacggatggcattcattacaagaagagcccatcatcgttgtgtttgcatggtttttttccttgtgtgtagcccatgttgggaacacgatacaggttctcctcttatttcctatgacacgatttcccttgtggaaatttaagactttaagaactagagtatttttatggtgtctgcacctgcagttctgtgtttaaaatgtcataatgtggatcctggagtcaggctactagtcagtgcccctagccagaggctggttcatgagttcatcaactgaggcctctgtggcttcaataaagtctacattttgctcacagatcacaacattcactgtggaaatatgatttcatttctttaggctacaaacctgtatttctttactgaatgctaaggccatgtttatattgggtagaaagatattgagatcccaattttgtacaagattgtgatttcattatctaaaccttaaacttaatcctttaaattttgtagcttttggctgcatctgccccaagtactattccaggcaaattaaagttggaatacctttaataatataaaaataatgatagtaaatcttatacttctgttggcccttagcttgaaaatagcagttaaaaaaatttaaatgttgccttgattatcagtacttaattatgttgtgcactaaaaccttaaatatttattactgtgaataaaaacaaattatctttactgtatagctggtttctttaaatgttgatagaattgtggcattacatctaaatttgtaagtcttttcatatcaaacaagcaaggctttttatgctgctaagtctgtgggtgcagaaagaaacaccccttggaagggcaaagagaagccggctggttgcatcaccccgtgcagtttctcacacacatctctttttctgattctgtgttcagaagaggctgccggcataaaacctaaatgcaaggttgacggagaacagcttgtctggcacaacaatggtgcaggcccacgagccagcatcacagcttggccatgggacgttgagtatgcacaaactagaactcttcccttcccaccttaggaatagaaaatcctcttcctttctaatctgaaaaacgaaaactgaacaaacacaaaaccaaccccttggcagttcccacctcctattgacatatggaatattgtgccttattgtaaaccagtttgaaaaatgttctgtaactaaagtgggttttcggctattatgtatacagcttggtatattactacgaaagataaccaccttgtgttgcaccttaaaaatatcaagaccatgtaatttccataacaaaataggtggcctggctatggtattatagcatacaattaggacactatgcccctgcaaaattttgtaaatcaaattcagaggcaaaaacatattttagaatcatacagtttgcacacgacaagtaggtaataactgtctctaaaaatgttttctccttagtccgcaatgagctaagattcagaatagtgtcaacagcatgctcctatatgaagttgttttttttaaagcacatttgtttatgacaagcctacattctcagtgaatatggcatttagtatttcttttgaaaacaaacttaagcatcatgagccaaagttgcactttgactcccaactacggtagcattatggacatctcacaatgtcaagggtttctgttatgtattagtaaagtatagattattggggcctacataatttaaaagaaatgtaaattaatattaaaagcttgtaaaaatatgtatatctttactatttctcaataaatacctttgcaattgttttcatttccttc

SEQ ID NO: 158 - DNA, 3896 bp, Homo Sapiens
acagtagtgaatcgtagcatgttagagttagaaggttcagtgttgatggagttattgaagaaatgatggagtaagagactcttttctaagcaactcaagtttgcagtgattcaggcctacttctgaagagacagccttttatctcaatgaatgacacagaaaaaccagcagatactccctctgaggaagaggactttggtgatccaaggacatatgacccagatttcaaggggcctgttgccaacaggagttgtacagatgttctgtgctgtatgatcttcctactgtgtattattggctacattgttttaggacttgtggcctgggtacatggggaccccagaagagcagcctatcctacagacagccagggccacttttgtggccagaagggcactcccaatgagaacaagaccattttgttttactttaacctgttacgctgtaccagtccctccgtgttgctaaacctacagtgccctaccacacagatctgtgtctccaagtgcccagaaaaatttttaacctatgtggaaatgcaacttttgtacacaaaagacaaaagctactgggaagactaccgtcagttctgtaagaccactgctaagcctgtgaagtctctcacacagcttttactggatgatgattgtccaacagcgatttttcccagcaaaccttttctccagagatgtttccctgacttctctaccaaaaatggcactttaacaataggaagtaagatgatgtttcaagatggaaatggagggacaagaagtgttgtagaactcgggattgctgcaaatggtatcaataaacttcttgatgcaaagtcacttggattgaaagtgtttgaagactatgcaagaacttggtattggattctcattggcctgacgattgccatggtccttagttggatatttttgatacttctgaggttcatagctggatgcctcttctgggtcttcatgattggtgtgattggaattataggttatggaatatggcactgttaccagcagtacaccaatcttcaggaacgcccaagttctgtattaactatctatgacatcgggattcagactaacataagcatgtactttgaactgcaacaaacatggttcacatttatgataatactctgcatcattgaagtgattgtcatcctcatgctgatcttcctcaggaatcgaatccgagtcgccattatcctgctgaaggaaggaagcaaagccattggatatgttcctagtacattagtctatccagctttaactttcattttgctctcaatctgcatttgctactgggtcgtgacagcagttttcttggcgacatcgggggtacctgtatacaaagtcatagctccaggggggcattgtatacatgaaaatcaaacctgtgacccagagatttttaatacaactgaaattgccaaagcttgccctggggctctgtgtaactttgctttctatggtggaaagagcttgtaccatcagtacatccctaccttccatgtatacaacttatttgtctttctctggcttataaacttcgtcattgcattaggtcagtgcgcccttgctggtgcattcgctacttattactgggccatgaaaaaacctgatgacatcccacgatatccactttttactgcatttggacgagccatacgatatcacacaggatccctagcatttggatctttaattattgcattaattcaaatgtttaaaattgtactagaatacttggaccaccgtcttaaacgtacccagaacacattgtctaaattcctacaatgctgcctgagatgctgcttctggtgtttggaaaatgcaataaagtttttaaacagaaatgcctatattatgattgcaatatatggcagaaacttctgcaggtcagcaaaagatgctttcaatctgctgatgagaaatgttttgaaagttgcagttacagatgaagttacatactttgtattattcctggggaaacttctagttgctggaagtataggtgttctggccttcctattcttcacacaaagactgccagtgattgcacaaggaccagcatctttaaattactactgggtacctttgctgacagtcatttttgggtcttacctgattgcacatgggttcttcagcgtctatgcaatgtgtgttgaaacaattttcatctgcttcttggaagatttagaaagaaatgatggttctactgcaagaccttattatgtgagtcaacctttgctgaagattttccaggaggaaaatccacaaactaggaagcagtagaagagcaaactggtcgtcctacagctgtgtgttaccttttctccatctgctgtgtctgtgcaacatttgtttcataagtgctttgtgtttagcaacactgtattcacgaccttgttggcttgcatttgcatgttttataccaaagcttatactgtactatgtgaagccatcagaagtcgcaagggaattgttaataacataaaacatttttatactaagatcatttgttttgtaattcgtttttaaagagtggcttggatgttttgaaaatactactgaatatgttaatattcttttaaatcttagattgaaaaatgatacattacttaaattgatagctcctaatatatttttaaaattacaactaaaagaagacttcttctgcagggaaaattggtcagcaaagtgaaattaaaaattttaaagtttttcccactctcgttggacagtaaatcagtgaaaggactgccccagttgagagtttgctctctttaagtatagaatgtttcctcttaaacaaattgccaatcatccagcctttactacttagccctctgacaaagtgccttactggctatttaatattacccagcttttatgggcaagtttacaaacattgttttttaaaaaattaaaacctgcaatgtttcgtgattaaaacaagtcttattgcatttgtttcactcttagctcactgattggaaaacatttgtcattttgctctgtttgatatcctcactattatggaatacattgtgcagctaaacaatttcccttgcgcctagtggacattcatgaatgtgtactacacgcaagaagaaacaaaccccgaaagaacacttgttggatttctttgtttttttttttactaaaagagaagttttaaaatgaaatgttttctatagtagatctttgaaaatacaataggtataatactgcatttctcagtgttttacaaagatcagaaagagaaacttctaggaattgcaaagggaaactttactcctcgaaagggtgctcacagatgtcatgtactgaatagctcccttttaaatgatcatttattttcatcaaagcctgttctatatatgccacttcattttctaacttttggtatgaaaaaatcagtttacttacagtatgttaattgtattgtactactataaacaggaacataatttccaattcagttttaaataattttaccagtactactaacttttaaggaaattaattcagttggttactcagtgtttgttacagaaagagtccagaaaagtattcaccctaagagaatgtcaatcatataatgataatttgtgaaagctttgagaatcaatcatcagtaagttactatcagtttataaaatattatcacatttgtttaaatgtgactttagatacttttatgccaaaaataaactcacatgagcacatgacagtctgagctctataatcagtgtgcttctgctgtgcagaaatgttagaaacgtattgtctaaatatctttgataattaaaatgtttaatatttaatgaaatttgttgttacttgttttaaatcttttttcttttaataaagatttaaataagaaat

SEQ ID NO: 159 - DNA, 1631 bp, Homo Sapiens
agtccaagctcagtcagcagaagagataaaagcaaacaggtctgggaggcagttctgttgccactctctctcctgtcaatgatggatctcagaaataccccagccaaatctctggacaagttcattgaagactatctcttgccagacacgtgtttccgcatgcaaatcaaccatgccattgacatcatctgtgggttcctgaaggaaaggtgcttccgaggtagctcctaccctgtgtgtgtgtccaaggtggtaaagggtggctcctcaggcaagggcaccaccctcagaggccgatctgacgctgacctggttgtcttcctcagtcctctcaccacttttcaggatcagttaaatcgccggggagagttcatccaggaaattaggagacagctggaagcctgtcaaagagagagagcattttccgtgaagtttgaggtccaggctccacgctggggcaacccccgtgcgctcagcttcgtactgagttcgctccagctcggggagggggtggagttcgatgtgctgcctgcctttgatgccctgggtcagttgactggcggctataaacctaacccccaaatctatgtcaagctcatcgaggagtgcaccgacctgcagaaagagggcgagttctccacctgcttcacagaactacagagagacttcctgaagcagcgccccaccaagctcaagagcctcatccgcctagtcaagcactggtaccaaaattgtaagaagaagcttgggaagctgccacctcagtatgccctggagctcctgacggtctatgcttgggagcgagggagcatgaaaacacatttcaacacagcccagggatttcggacggtcttggaattagtcataaactaccagcaactctgcatctactggacaaagtattatgactttaaaaaccccattattgaaaagtacctgagaaggcagctcacgaaacccaggcctgtgatcctggacccggcggaccctacaggaaacttgggtggtggagacccaaagggttggaggcagctggcacaagaggctgaggcctggctgaattacccatgctttaagaattgggatgggtccccagtgagctcctggattctgctggctgaaagcaacagtgcagacgatgagaccgacgatcccaggaggtatcagaaatatggttacattggaacacatgagtaccctcatttctctcatagacccagcacactccaggcagcatccaccccacaggcagaagaggactggacctgcaccatcctctgaatgccagtgcatcttgggggaaagggctccagtgttatctggaccagttccttcattttcaggtgggactcttgatccagagaggacaaagctcctcagtgagctggtgtataatccaggacagaacccaggtctcctgactcctggccttctatgccctctatcctatcatagataacattctccacagcctcacttcattccacctattctctgaaaatattccctgagagagaacagagagatttagataagagaatgaaattccagccttgactttcttctgtgcacctgatgggagggtaatgtctaatgtattatcaataacaataaaaataaagcaaatacca

SEQ ID NO: 160 - DNA, 5197 bp, Homo Sapiens
agcctcggcagtggcgtcggcgacggcggtgtcgaggcagccgccagcgttcggccaagtgtcagccggcagcgacggcgctagagctgggagctggggacgcgcgcgccggaccttccacagcctccgcccagagcctgaggcgccggggccgggggagccggggggcgggcgggcgagcgggccggggggagggtgggggatggcgcggaccctgcggccgtccccgctgtgtcctggaggcggcaaagcacaactttcctccgcttctctcctcggagccgggctcctgctgcagcccccgacgccacctccgctgctgctgctgctcttcccgctgctgctcttctccaggctctgtggtgccttagctggaccaattattgtggagccacatgtcacagcagtatggggaaagaatgtttcattaaagtgtttaattgaagtaaatgaaaccataacacagatttcatgggagaagatacatggcaaaagttcacagactgttgcagttcaccatccccaatatggattctctgttcaaggagaatatcagggaagagtcttgtttaaaaattactcacttaatgatgcaacaattactctgcataacataggattctctgattctggaaaatacatctgcaaagctgttacattcccgcttggaaatgcccagtcctctacaactgtaactgtgttagttgaacccactgtgagcctgataaaagggccagattctttaattgatggaggaaatgaaacagtagcagccatttgcatcgcagccactggaaaacccgttgcacatattgactgggaaggtgatcttggtgaaatggaatccactacaacttcttttccaaatgaaacggcaacgattatcagccagtacaagctatttccaaccagatttgctagaggaaggcgaattacttgtgttgtaaaacatccagccttggaaaaggacatccgatactctttcatattagacatacagtatgctcctgaagtttcggtaacaggatatgatggaaattggtttgtaggaagaaaaggtgttaatctcaaatgtaatgctgatgcaaatccaccacccttcaaatctgtgtggagcaggttggatggacaatggcctgatggtttattggcttcagacaatactcttcattttgtccatccattgactttcaattattctggtgtttatatctgtaaagtgaccaattcccttggtcaaagaagtgaccaaaaagtcatctacatttcagatcctcctactactaccacccttcagcctacaattcagtggcatccctcaactgctgacatcgaggatctagcaacagaacctaaaaaattgcccttcccattgtcaactttggcaacaattaaggatgacacaattgccacgatcattgctagtgtagtgggtggggctctcttcatagtacttgtaagtgttttggctggaatattctgctataggagaagacggacgtttcgtggagactactttgccaagaactacattccaccatcagatatgcaaaaagaatcacaaatagatgttcttcaacaagatgagcttgattcttacccagacagtgtaaaaaaagaaaacaaaaatccagtgaacaatctaatacgtaaagactatttagaagagcctgaaaaaactcagtggaacaatgtagaaaatctcaataggtttgaaagaccaatggattattatgaagatctaaaaatgggaatgaagtttgtcagtgatgaacattatgatgaaaacgaagatgacttagtttcacatgtagatggttccgtaatttccaggagggagtggtatgtttagcaaccactgaatgtgacttaactatgtacaatgttcattcacactagttgatcattttcagattgttcatactttttcttgaggaagaataagctttttcaagttgattttcaagcttactttttatattctaatctgacaaatgaaaatgtaaaatctgagttcagtgtatctaagctgctttacaattttttttcaatgctgtactactgtctcaagatttaaattttaatgcagagtactttattggtgtgaggcacacaggtaagaagaaatgtcaacattaaatgtatgacttacttggtacaaaaattttttaaaaagggaactaccttgacattgtgtattaaatgtttacctaagactataatctcaagtatgatgtttgtttaacatatacctctcaaaatttatcaccactcaatgacactgcatcaaaattgactataaaactaattcaagaaatatttatatatattttttaatatacaaaaaatatttagcctgatggaatggctttccttttcaaacattattttctaagtttctatacaaatgaaatctttacctctgcatattaatgagccttgccataattactgtagagtggcttttcaaagatattttgttgcactaaaactgtggtagtaaactcagtgaacatgatgtgtggaagagcataattagctggtcaatatttttgtccaaaatacctgcaagagtaataaaatacatacctttcaaacatgataattattagtttttttttttcctttctggaacatggattttggtacattagcagtagccttattttaatgctttatgtcctaaacatactaatagaaatgaaaagacgcagagagagcatttcggaatactgaagtactagttttagaaatgagactttcagccaacaatctatagaaagaattttatggaccatcttgttttagttatttaatgttgatgttgttcaaatgggtaaatgtacagaaagaaaattttagagtaaacttggaactttggatataactagaaaaaactagattatagaattagtcggtaacacttgctaatggacattggcattcatctcctttttcctcctaagtgtatgtatgtgttttaagatttctgtttttacgattaaaactggaaacatgaggttttttgtttttgtttttttacataattacatatattccttctgaatcatttatcttttgagaaagaaatgttacctaaacttcaaatgtgctttttgtttgtgaggtaattaaattgcttctacagtggaggcttacaaaattattgtgacaactattttgaagctgaaaggatagtttttctattgctaagtcatttgaaaaagtgaccattttgccagtgaaatgaagtggaagttagtaggagaatcataaattaaatatattattttgttaataaaaaggcaaagtagtaggtactttttaaaccctcccaaccagccctttctcaatattcatcaaatctaaaacatttagggggcaaaattctaacatgttcatggtatcttgcaaatagtgaaagctttattctgaaggattataaactagttttcttcattttaactagcactattttgtggaaattagaaacctcttttatttctcttcccaaaagtaatacttattataaggctgtagtatcaggttaaggatacagataaataaagttcacttatatcttcttacaaatgtctgggttttaatatggttaatcacttatatacaaatattacaactttttagtgcaagtttttggaagaaaactttttgataaaacactgtgattgatgtgactttatttttaatttaaacgatgaggtggccagaagaaagatgggtctaaaatttctccccatgaaagatgtaaaactatggctttttttaaaatcaaaatttcatcttttaaaataatggtttgaaatactgtatggatctgaacagaataatcacatttaggattctatataaatctcaactggagtataatctgaaggaaattagcagtgtattttaagaaatatatttcaaaaatataaatactgattatgaacttccttttacattgtggttatttgtgcgattaggtttttttgtttgtttcttttgtgtttgtttggcgggagagggtgacctggaaagccacaagtgagtatttgacatattctgtatccttaatccaatcatttggcaaactaaaaggtttctgtgttgtaagaatctgatactagtgcttaagactttgggaagcattgcactgttgtttattagaactttatgtatatttactgtacatagagacttgtttgaaaacatgaatagtcattaaataaagacattgttaaattagtttttgaataccagtgatattcataactacttgacaggtatatatgaaaattctactatcgtgaaaaaaaatgaatatttgtactatttttggccatatttatatttatttctttcatatggtttgaactgttttagcattttgtaaattcacttgagagttttctttcatactggttaaaatatttcaatgatataatgaagatgaatgcaactcttatttttctgccattttttattaaaatacattgaaactaaagtaggctcggggttaactttaaaagtgatatttgagaagtgctttagagttgaaagatttagtattttaccacgtgcctagtagggttctatttgctaactctaatattgaggaaactattaaggttttcagtagtaagtgttgcttctaatagccatatacaggaaagttttataagataacccacggctaaatattttgcattaaggagctgtaggagtacagtgtataagtacagaaattgagagaaatgtagtcattttatatgtgaaaacatctgatttgagtttttgataaatactgctaaaacacagtatatgaacaagtaagaagtttatgtatgaaagtaatcaatgtaaaatataagaaaggaataaatggtacccattttgaatttttaattctaataggagagtagattgtagattgaattgtctttcctgtttacttgttaattagaaaatgcatccttcataaacagctcctttctcaaattttttgtatattgtgtttgtgtttgggttttagtttgtacccgcgctaagttttggttttgttgtgtttggtgttttttgttttgttttgttttgttttgttttttcttttttaaccaacctgtgtattaggtgttagccccaatagccatgcatgaaatctttaaataaaagttaaaaaagttctttagaggca

SEQ ID NO: 161 - DNA, 2162 bp, Homo Sapiens
tttgaggatgtaggcactggtgtgaaggaacatggccctgtatcagaggtggcggtgtctccggctccaaggtttacaggcttgcaggctacacacggcagttgtgtcgacccctccacgctggttggcagagcggcttggcctttttgaggagctgtgggctgctcaggtaaagagattagcaagcatggcacagaaggaaccccggactattaagatatcacttcctggaggccagaaaattgatgctgtggcatggaacacaaccccctaccaactagcccggcagatcagttcaacactggcagatactgcagtggctgctcaagtgaatggagaaccttatgatctggagcggcccttggagacagattctgacctcagatttctgacattcgattccccagaggggaaagcagtgttctggcactccagcacccatgtcctgggggcagcagctgaacaattcctaggtgctgttctctgcagaggtccaagtacagaatatggcttttaccatgatttcttcctgggaaaggagaggacaatccggggctcagagctgcctgttttggagcggatttgccaggaacttacagctgctgctcgacccttccggaggctagaggcttcacgggatcagcttcgccagttgttcaaggataacccctttaagcttcacttgattgaggagaaagtgacaggtccaacagcaacagtatatgggtgtggcacattggttgacctttgccagggcccccaccttcggcatactggacagattggaggactgaagctgctatcggctgagtatgcccatcgtggtttctccgaggtgaaaactcccacactgttttctacgaagctctgggaacagtcagggcactgggagcattatcaggaagacatgtttgccgtgcagcccccaggctctgacaggcctcccagctcccagagtgacgattctaccaggcatatcacagatacactcgccctcaagcctatgaactgccctgcacactgcctgatgttcgcccaccggcccagatcctggcgggaactgcccctgcgactagctgactttggggctctacaccgggccgaagcctctggtggtctggggggactgacccgactgcggtgcttccagcaggatgacgctcacatcttctgtacaacagatcagctggaagcagagatccaaagctgtcttgatttcctccgttccgtctatgccgttcttggcttctccttccgcctggcactgtccacccggccatctggcttcctgggggacccttgcctttgggaccaggccgaacaggtccttaaacaggccctgaaggaatttggagaaccctgggacctcaactctggagatggtgccttctatggacctaagattgacgtgcacctccacgatgccctgggccggccacatcagtgtgggacaattcagcttgacttccaactgcccctgagatttgacctccagtataaggggcaggcgggtgccctggagcgtccagtcctcattcaccgagcagtgctcggttctgtggaaagactgttgggagtgctggcagaaagctgcggggggaaatggccactgtggctgtccccgttccaggtggtggtcatccctgtggggagtgagcaagaggaatacgccaaagaggcacagcagagcctgcgggctgcaggactggtcagtgacctggatgcagactctggactgaccctcagccggagaatccgccgggcccagcttgcccactacaattttcagtttgtggttggccagaaagagcaaagtaagagaacagtgaacattcggactcgagataatcgtcgccttggggagtgggacttgcctgaggctgtgcagcgactggtggagctacagaacacgagggtcccaaatgccgaagaaattttctgagcctttgtacatagatgaggcaaaaacctgcgagtgccatcagcctccctcacatgggagaccccaacccagctgacaatgtggagcccccagaacttcagaactgtgtggaggcacatgtctgctctcctgaaaagagacttggtttggggaccccacaaaaggagggaagctgtagctgtttggatgtgaggagaatgaaactacaaaaaaaaataaa

SEQ ID NO: 162 - DNA, 2650 bp, Homo Sapiens
gtagagctggctggctgtgcccttccgtccttcattagacgtttgctcttgtcttagatgctcagatggtagtggataggcctgtgacgaaggtgctaccatcgtgagagtaagattatattctcctgccttttaaaaagatggacttcagcagaaatctttatgatattggggaacaactggacagtgaagatctggcctccctcaagttcctgagcctggactacattccgcaaaggaagcaagaacccatcaaggatgccttgatgttattccagagactccaggaaaagagaatgttggaggaaagcaatctgtccttcctgaaggagctgctcttccgaattaatagactggatttgctgattacctacctaaacactagaaaggaggagatggaaagggaacttcagacaccaggcagggctcaaatttctgcctacagggtcatgctctatcagatttcagaagaagtgagcagatcagaattgaggtcttttaagtttcttttgcaagaggaaatctccaaatgcaaactggatgatgacatgaacctgctggatattttcatagagatggagaagagggtcatcctgggagaaggaaagttggacatcctgaaaagagtctgtgcccaaatcaacaagagcctgctgaagataatcaacgactatgaagaattcagcaaaggggaggagttgtgtggggtaatgacaatctcggactctccaagagaacaggatagtgaatcacagactttggacaaagtttaccaaatgaaaagcaaacctcggggatactgtctgatcatcaacaatcacaattttgcaaaagcacgggagaaagtgcccaaacttcacagcattagggacaggaatggaacacacttggatgcaggggctttgaccacgacctttgaagagcttcattttgagatcaagccccacgatgactgcacagtagagcaaatctatgagattttgaaaatctaccaactcatggaccacagtaacatggactgcttcatctgctgtatcctctcccatggagacaagggcatcatctatggcactgatggacaggaggcccccatctatgagctgacatctcagttcactggtttgaagtgcccttcccttgctggaaaacccaaagtgttttttattcaggcttgtcagggggataactaccagaaaggtatacctgttgagactgattcagaggagcaaccctatttagaaatggatttatcatcacctcaaacgagatatatcccggatgaggctgactttctgctggggatggccactgtgaataactgtgtttcctaccgaaaccctgcagagggaacctggtacatccagtcactttgccagagcctgagagagcgatgtcctcgaggcgatgatattctcaccatcctgactgaagtgaactatgaagtaagcaacaaggatgacaagaaaaacatggggaaacagatgcctcagcctactttcacactaagaaaaaaacttgtcttcccttctgattgatggtgctattttgtttgttttgttttgttttgtttttttgagacagaatctcgctctgtcgcccaggctggagtgcagtggcgtgatctcggctcaccgcaagctccgcctcccgggttcaggccattctcctgcctcagcctcccgagtagctgggactacaggggcccgccaccacacctggctaattttttaaaaatatttttagtagagacagggtttcactgtgttagccagggtggtcttgatctcctgacctcgtgatccacccacctcggcctcccaaagtgctgggattacaggcgtgagccaccgcgcctggccgatggtactatttagatataacactatgtttatttactaattttctagattttctactttattaattgttttgcacttttttataagagctaaagttaaataggatattaacaacaataacactgtctcctttctcttatgcttaaggctttgggaatgtttttagctggtggcaataaataccagacacgtacaaaatccagctatgaatatagagggcttatgattcagattgttatctatcaactataagcccactgttaatattctattaactttaattctctttcaaagctaaattccacactaccacattaaaaaaattagaaagtagccacgtatggtggctcatgtctataatcccagcactttgggaggttgaggtgggaggattgcttgaacccaagaggtcaaggctgcagtgagccatgttcacaccgctgcactcaagcttgggtgacagaacaagaccccgtctcaaaaaaaattttttttttaataaaacaaaatttgtttgaaatcttttaaaaattcaaatgatttttacaagttttaaataagctctccccaaacttgctttatgccttcttattgcttttatgatatatatatgcttggctaactatatttgctttttgctaacaatgctctggggtctttttatgcatttgcatttgctctttcatctctgcttggattattttaaatcattaggaattaagttatctttaaaatttaagtatcttttttcaaaaacattttttaatagaataaaatataatttgatctta

SEQ ID NO: 163 - DNA, 3119 bp, Homo Sapiens
acatctctcacgataaatgagtggggagaacttatagcccttgaagtcaaccatctcacacctttccaaaggacgcgaccataactctaaaaggctccagatggaccctgggaaggacaaagagggggtgccccagccctcagggccgccagcaaggaagaaatttgtgatacccctcgacgaggatgaggtccctcctggagtgaggggcaatcccgtactgaagttcgtgcgcaatgtgccctgggaatttggcgacgtaattcccgactatgtgctgggccagagcacctgtgccctgttcctcagcctccgctaccacaacctgcacccagactacatccatgggcggctgcagagcctggggaagaacttcgccttgcgggtcctgcttgtccaggtggatgtgaaagatccccagcaggccctcaaggagctggctaagatgtgtatcctggccgactgcacattgatcctcgcctggagccccgaggaagctgggcggtacctggagacctacaaggcctatgagcagaaaccagcggacctcctgatggagaagctagagcaggacttcgtctcccgggtgactgaatgtctgaccaccgtgaagtcagtcaacaaaacggacagtcagaccctcctgaccacatttggatctctggaacagctcatcgccgcatcaagagaagatctggccttatgcccaggcctgggccctcagaaagcccggaggctgtttgatgtcctgcacgagcccttcttgaaagtaccctgatgaccccagctgccaaggaaacccccagtgtaataataaatcgtcctcccaggccaggctcctgctggctgcgctggtgcagtctctggggagggattctgggggtgtcaccttctggtggcccaggtgggcaccttcagctttctttagttcctcagtttcccgggggcagactacacaggctgctgctgctgctgcttccgcttcttgtcccggcctgtgggagcctcctccccagactctgaattcagtggcggccctggcatctcctcttggggcactgtctctggcatccggctttcctgactctgcttcttcctcttcttggtggatcccggagttgccctggcttcaggctgtccctcccctggcagttcaggctctagtggctgaattggctcagtcactgtgtgacctctctctttcttcttcttcttcttcttggtggatgtgggagctgcctgaggctcaaggtcatccggcagctcaggccccaccacctctgtctctggctccactgtggcatcttgctgtttttctttcttcgtcttctttttgggagctgccagagctgcctgggcctgaggcttcgctccttctggctgttgaggcgccatggtcccccctggggactccagaggcttcatctccggctccactggctccatcgcctccgtccctggctccatcattgccatctgtcccttttcttttttcctcttcttcgtagggggcagagggatggcttcctccagtggctccaccttcacctgtggctgagactcaactgtcaccccctcctctggctccatcccttccgtccccttttgcctctttctctttttggtcggggacaggactgtgtcttctagaggctcagtgttaatctgttcctgcttcactgtcttgtcttctggctcgaaggtttctttccctttgggcttcttcctcttcttggtggtggacgggaacagcactcccagaggctccagtgtctccactgtgggctctgtccccacaggccctgctgcctctggttctttcagctgctgattttttttcttcttcttcttccgcacatccatttctggcgaccccaaagccatgtccacctccagggccccgtgcccattcactgcctcctgagtgactggggcctctgtcacctgcatctcctttttcttcttccctgaggtgagcaggttgggggccaaggctgacctaggccctgtgactggtgggttgcccccaaaggcacagaaccgaggcctcaggccaggagggatctgtggtgggggacttgctgggatgggctgcagagggctccctgacagggattgctggggaccctcaaggatccttagggtgccctggggggctgaggcacaggtgagtccacctcctgcctccgttgagggggccagcagggtcgcttctccagcttggggacagctgctgaggactcgatagcggtgccgcttgcctgccaatttgcccttgacgatctgggagccagagagaggcacatgccgcccattgaagctacagagagaaacagggagggcagaggcttaagtggaacaggagagggaaggttttttgattttttttttgtttttttttgagagagtcttgctctgttgcctaggctggagtgcagtggcatgatctcggctcactgcaatgtccacctcctgggttcaagcgattctcctgcctcagcctctcaagtagctgggattacaggcacctgccaccacgcccagccaatttttgtatttttagtagagacaatttcactatgttggccaggctggtcttgaactcctgacctcaagtgatctgctcgcctcggcctcccaaaggatgggattacaggcaccagccactgcgcctggctggcctctggtttttaataaaacatgactagagtgactccatcttaaagtgagtagctaggcacttacaaggttcatgcttatggcctgaaaataaccacatcccaggctgaccaccaattataattacagaatatttatggccatacagaacatgttccaccaagcctgcagaatgtccaaatgtcctaagaatgcagcccccattacttaaatataacataaatgagcaagcttaggttgcaggattaatggtcgtggataacaccaatagcccctacctttagtgagcttatctgcacactccaagtttaactatagttccttatagtttcttataagtagaaatactaacaaagggctgtgggtttctccccctgctttctgaggacactctactctgtaaaggagtagtttccaataaacttgtttctttcactgtg

SEQ ID NO: 164 - DNA, 1219 bp, Homo Sapiens
gtgtcgcgggtcggagctcggtcctgctggaggccacgggtgccacacactcggtcccgacatgatggcgagcatgcgagtggtgaaggagctggaggatcttcagaagaagcctcccccatacctgcggaacctgtccagcgatgatgccaatgtcctggtgtggcacgctctcctcctacccgaccaacctccctaccacctgaaagccttcaacctgcgcatcagcttcccgccggagtatccgttcaagcctcccatgatcaaattcacaaccaagatctaccaccccaacgtggacgagaacggacagatttgcctgcccatcatcagcagtgagaactggaagccttgcaccaagacttgccaagtcctggaggccctcaatgtgctggtgaatagaccgaatatcagggagcccctgcggatggacctcgctgacctgctgacacagaatccggagctgttcagaaagaatgccgaagagttcaccctccgattcggagtggaccggccctcctaactcatgttctgaccctctgtgcactggatcctcggcatagcggacggacacacctcatggactgaggccagagccccctgtggcccattccccattcatttttcccttcttaggttgttagtcattagtttgtgtgtgtgtgtggtggagggaagggagctatgagtgtgtgtgttgtgtatggactcactcccaggttcacctggccacaggtgcacccttcccacaccctttacattccccagagccaagggagtttaagtttgcagttacaggccagttctccagctctccatcttagagagacaggtcaccttgcaggcctgcttgcaggaaatgaatccagcagccaactcgaatccccctagggctcaggcactgagggcctggggacagtggagcatatgggtgggagacagatggagggtaccctatttacaactgagtcagccaagccactgatgggaatatacagatttaggtgctaaaccatttattttccacggatgagtcacaatctgaagaatcaaacttccatcctgaaaatctatatgtttcaaaaccacttgccatcctgttagattgccagttcctgggaccaggcctcagactgtgaagtatatatcctccagcattcagtccagggggagccacggaaaccatgttcttgcttaagccattaaagtcagagatgaa

SEQ ID NO: 165 - DNA, 996 bp, Homo Sapiens
aaaggttactcccagacccttttccggctgacttctgagaaggttgcgcagcagctgtgcccggcagtctagaggcgcagaagaggaagccatcgcctggccccggctctctggaccttgtctcgctcgggagcggaaacagcggcagccagagaactgttttaatcatggacaaacaaaactcacagatgaatgcttctcacccggaaacaaacttgccagttgggtatcctcctcagtatccaccgacagcattccaagatagatcagatactgattcatcagcaaattgaacttctggaagttttaacaggttttgaaactaataacaaatatgaaattaagaacagctttggacagagggtttactttgcagcggaagatactgattgctgtacccgaaattgctgtgggccatctagaccttttaccttgaggattattgataatatgggtcaagaagtcataactctggagagaccactaagatgtagcagctgttgttgtccctgctgccttcaggagatagaaatccaagctcctcctggtgtaccaataggttatgttattcagacttggcacccatgtctaccaaagtttacaattcaaaatgagaaaagagaggatgtactaaaaataagtggtccatgtgttgtgtgcagctgttgtggagatgttgattttgagattaaatctcttgatgaacagtgtgtggttggcaaaatttccaagcactggactggaattttgagagaggcatttacagacgctgataactttggaatccagttccctttagaccttgatgttaaaatgaaagctgtaatgattggtgcctgtttcctcattgacttcatgttttttgaaagcactggcagccaggaacaaaaatcaggagtgtggtagtggattagtgaaagtctcctcaggaaatctgaagtctgtatattgattgagactatctaaactcatacctgtatgaattaagctgtaagg

SEQ ID NO: 166 - DNA, 1474 bp, Homo Sapiens
gcgccaaacttgaccgcgcgttctgctgtaacgagcgggctcggaggtcctcccgctgctgtcatggttggttcgctaaactgcatcgtcgctgtgtcccagaacatgggcatcggcaagaacggggacctgccctggccaccgctcaggaatgaattcagatatttccagagaatgaccacaacctcttcagtagaaggtaaacagaatctggtgattatgggtaagaagacctggttctccattcctgagaagaatcgacctttaaagggtagaattaatttagttctcagcagagaactcaaggaacctccacaaggagctcattttctttccagaagtctagatgatgccttaaaacttactgaacaaccagaattagcaaataaagtagacatggtctggatagttggtggcagttctgtttataagatacccaggtgttctctctgatgtccaggaggagaaaggcattaagtacaaatttgaagtatatgagaagaatgattaatatgaaggtgttttctagtttaagttgttccccctccctctgaaaaaagtatgtatttttacattagaaaaggttttttgttgactttagatctataattatttctaagcaactagtttttattccccactactcttgtctctatcagataccatttatgagacattcttgctataactaagtgcttctccaagaccccaactgagtccccagcacctgctacagtgagctgccattccacacccatcacatgtggcactcttgccagtccttgacattgtcgggcttttcacatgttggtaatatttattaaagatgaagatccacatacccttcaactgagcagtttcactagtggaaataccaaaagcttcctacgtgtatatccagaggtttgtagataaatgttgccaccttgtttgtaacagtgaaaaattgaaaacaacctggaagtccagtgatgggaaaatgagtatgtttctgtcttagattggggaacccaaagcagattgcaagactgaaatttcagtgaaagcagtgtatttgctaggtcataccagaaatcatcaattgaggtacggagaaactgaactgagaaggtaagaaaagcaatttaaagtcagcgagcaggttctcattgataacaagctccatactgctgagatacagggaaatggaggggggaaagctggagtattgatcccgcccccctccttggttgtcagctccctgtcctgtgtgtgggcggaacatagtccagctgctctatagcaagtctcaggtgtttgcagtaagaagctgctggcatgcacgggaacagtgaatgccaaacacttaaagcaattcgatgtttaagtatgtaagttcttttttttttagacagcgtttcgctcttgttgcccaggctagcatgcaatggtgtgacctcggcttactgcaacctccgccttcccagattcaagc

SEQ ID NO: 167 - DNA, 6161 bp, Homo Sapiens
agacggttgggcggacggacggcccgacaggcgggcatgcgggcggccagactgtagccgagcagcgaggctccggccgcagccatggagcggcggctgcgcgcgctggagcagctggcgcggggcgaggccggcggctgcccggggctcgacggcctcctagatctgctgctggcgctgcaccacgagctcagcagcggccccctacggcgggagcgcagcgtggcgcagttcctgagctgggccagccccttcgtatcaaaggtgaaagaactgcgtctgcagagagatgactttgagatcttgaaggtgatcggccgaggagcctttggggaggtcaccgtggtgaggcagagggacactgggcagatttttgccatgaaaatgctgcacaagtgggagatgctgaagagggctgagacagcctgtttccgggaggagcgggatgtgctcgtgaaaggggacagccgttgggtgaccactctgcactatgccttccaagacgaggagtacctgtaccttgtgatggactactatgctggtggggacctcctgacgctgctgagccgcttcgaggaccgtctcccgcccgagctggcccagttctacctggctgagatggtgctggccatccactcgctgcaccagctgggttatgtccacagggatgtcaagccagacaacgtcctgctggatgtgaacgggcacattcgcctggctgacttcggctcctgcctgcgtctcaacaccaacggcatggtggattcatcagtggcagtagggacgccggactatatctcccctgagatcctgcaggccatggaggagggcaagggccactacggcccacagtgtgactggtggtcgcttggagtctgcgcctatgagctgctctttggggagacgcccttctatgctgagtccttggtggaaacctacggcaagatcatgaaccacgaggaccacctgcagttccccccggacgtgcctgacgtgccagccagcgcccaagacctgatccgccagctgctgtgtcgccaggaagagcggctaggccgtggtgggctggatgacttccggaaccatcctttcttcgaaggcgtggactgggagcggctggcgagcagcacggccccctatattcctgagctgcgggggcccatggacacctccaactttgatgtggatgacgacaccctcaaccatccagggaccctgccaccgccctcccacggggccttctccggccatcacctgccattcgtgggcttcacctacacctcaggcagtcacagtcctgagagcagctctgaggcttgggctgccctggagcggaagctccagtgtctggagcaggagaaggtggagctgagcaggaagcaccaagaggccctgcacgcccccacagaccatcgggagctggagcagctacggaaggaagtgcagactctgcgggacaggctgccagagatgctgagggacaaggcctcattgtcccagacggatgggcccccagctggtagcccaggtcaggacagtgacctacggcaggagcttgaccgacttcaccgggagctggccgagggtcgggcagggctgcaggctcaggagcaggagctctgcagggcccaggggcagcaggaggagctgcttcagaggctacaggaggcccaggagagagaggcggccacagctagccagacccgggccctgagctcccagctggaggaagcccgggctgcccagagggagctggaggcccaggtgtcctccctgagccggcaggtgacgcagctgcagggacagtgggagcaacgccttgaggagtcgtcccaggccaagaccatccacacagcctctgagaccaacgggatgggaccccctgagggtgggcctcaggaggcccaactgaggaaggaggtggccgccctgcgagagcagctggagcaggcccacagccacaggccgagtggtaaggaggaggctctgtgccagctgcaggaggaaaaccggaggctgagccgggagcaggagcggctagaagcagagctggcccaggagcaggagagcaagcagcggctggagggtgagcggcgggagacggagagcaactgggaggcccagctcgccgacatcctcagctgggtgaatgatgagaaggtctcaagaggctacctgcaggccctggccaccaagatggcagaggagctggagtccttgaggaacgtaggcacccagacgctccctgcccggccactggaccaccagtggaaggcgcggcgactgcagaagatggaggcctcggccaggctggagctgcagtcagcgctggaggccgagatccgcgccaagcagggcctgcaggagcggctgacacaggtgcaggaggcccagctgcaggctgagcgccgtctgcaggaggccgagaagcagagccaggccctgcaacaggagctcgccatgctgcgggaggagctgcgggcccgagggccagtggacaccaagccctcaaactccctgattcccttcctgtccttccggagctcagagaaggattctgccaaggaccctggcatctcaggagaggccacaaggcatggaggagagccagatctgaggccggagggccgacgcagcctgcgcatgggggctgtgttccccagagcacccactgccaacacagcctctacagaaggtcttcctgctaagcccggctcacacacgctgcgcccccggagcttcccatccccgaccaagtgtctccgctgcacctcgctgatgctgggcctgggccgccagggcctgggttgtgatgcctgcggctacttttgtcacacaacctgtgccccacaggccccaccctgccccgtgccccctgacctcctccgcacagccctgggagtacaccccgaaacaggcacaggcactgcctatgagggctttctgtcggtgccgcggccctcaggtgtccggcggggctggcagcgcgtgtttgctgccctgagtgactcacgcctgctgctgtttgacgcccctgacctgaggctcagcccgcccagtggggccctcctgcaggtcctagatctgagggacccccagttctcggctacccctgtcctggcctctgatgttatccatgcccaatccagggacctgccacgcatctttagggtgacaacctcccagctggcagtgccgcccaccacgtgcactgtgctgctgctggcagagagcgagggggagcgggaacgctggctgcaggtgctgggtgagctgcagcggctgctgctggacgcgcggccaagaccccggcccgtgtacacactcaaggaggcttacgacaacgggctgccgctgctgcctcacacgctctgcgctgccatcctcgaccaggatcgacttgcgcttggcaccgaggaggggctctttgtcatccatctgcgcagcaacgacatcttccaggtgggggagtgccggcgcgtgcagcagctgaccttgagccccagtgcaggcctgctggtcgtgctgtgtggccgcggccccagcgtgcgtctctttgccctggcggagctggagaacatagaggtagcaggtgccaagatccccgagtctcgaggctgccaggtgctggcagctggaagcatcctgcaggcccgcaccccggtgctctgtgtagccgtcaagcgccaggtgctctgctaccagctgggcccgggccctgggccctggcagcgccgcatccgtgagctgcaggcacctgccactgtgcagagcctggggctgctgggcgaccggctatgtgtgggcgccgccggtggctttgcactctacccgctgctcaacgaggctgcgccgttggcgctgggggccggtttggtgcctgaggagctgccaccatcccgcgggggcctgggtgaggcactgggtgccgtggagcttagcctcagcgagttcctgctactcttcaccactgctggcatctacgtggatggcgcaggccgcaagtctcgtggccacgagctgttgtggccagcagcgcccatgggctgggggtatgcggccccctacctgacagtgttcagcgagaactccatcgatgtgtttgacgtgaggagggcagaatgggtgcagaccgtgccgctcaagaaggtgcggcccctcaatccagagggctccctgttcctctacggcaccgagaaggtccgcctgacctacctcaggaaccagctggcagagaaggacgagttcgacatcccggacctcaccgacaacagccggcgccagctgttccgcaccaagagcaagcgccgcttctttttccgcgtgtcggaggagcagcagaagcagcagcgcagggagatgctgaaggacccttttgtgcgctccaagctcatctcgccgcctaccaacttcaaccacctagtacacgtgggccctgccaacgggcggcccggcgccagggacaagtccccggctcccgaagagaagggccgagttgcccgcggctccggcccacagcggccccacagcttctccgaggcgttgcggcgcccagcctccatgggcagcgaaggcctcggtggagacgcagaccccatgaagaggaaaccctggacatccctgtccagcgagtctgtgtcctgcccccagggatcgctgagccctgcaacctccctaatgcaggtctcagaacggccccgaagcctccccctatcccctgaattggagagctctccttgatgccctctgttagggcccaccccaatcccagggcagaaggacatgagggagcaaagagcttgaggaatgccatactccggctggtccgggacatggaaattcggactcagggaggacccgggctgggcaatgactgggagacttgcctgggttcccaggacttgggggtcctgactcccagccctcatcctgccttacccctctgttcccagccccagcctttctaagccattgggaatagaatggccccttttgttctggtgtccaggggtgattgtgccaaagctcttatttccagtgccaagcccccagaggcttgtaagagttgggatgagggatggagagggactgggtctctgggaacaggttggaggtcttatctgtggactgtctgactcccagctgaggccaagatggggcatgtccccgtctctgcttagcgtctgggtgagaaaaacaggctgtgatccagaagaagggaagatagagaaggagggaaaggatgtaggcgaaggaggtgagagacaggataggaggaaggaagtggaggaggaggtgataggaattggaaggaggtagaagccgtgcagaggaagaggggagagggacgaaggaggagcgatgaagaagaggagggagacaaaaagagggatggaggagagagggagtctggagaacaaagggtcctttctctggggaggggtgcagtgggcggggctgacactgtcagccaatcctcccatcggggaagagaatcctggacagggacaggatggggagggtatttataagggctttttggtgggagatgggtacccagtgggggccactggagggtctccgggcacactctggcccttcccagaaagggggtcgtttttctcgaatcttcaaccagttgtgtattggaaactagggcgcattttactattgatcacagtcattatattgttattatattactatttttattaaacctccccccactgaagtgtggggggcaaaataagtatttatctcctcaaatgccacattcccaggagggacagaccctgatgctctgtgaggcgcaagaaaccaataaagatgccgggcgcggtggctcacgcctgtaatcccagcactttgggaggccgaggcgggcagatcccgaggtcaggagattgagaccatcctggctaacacggtgaaaccccatctctactaaaaatacaaaaaattagccgggcgtggtgacgggtgcctgtagtccctgctactcgggaggctgaggcaggagaatggcgtgaacccgggaggcggagcttgcagtgagccgagatcgcgccactgcactccagcctgggtgacagagtgagactccgtctcaaaaaaaaaaaaaaagaaaagaaaaggaaaccaataaagacagctttgtaagc

SEQ ID NO: 168 - DNA, 1232 bp, Homo Sapiens
gtgagcgccagaaggcagggatttcacggaaatgaaagtggaagcaaacagcctgcgagcagagcctcctgaggtgtatttcgggtcttgctggggctgagagagaccacagccctttggggggtacaaacaagagttcagttgctgtgaattctgccactgtgcccagctctgaagcctcagctcttgccaaacagacccgagacccatgtcagccccactggatgccgccctccacgcccttcaggaggagcaggccagactcaagatgaggctgtgggacctgcagcagctgagaaaggagctcggggactcccccaaagacaaggtcccattttcagtgcccaagatccccctggtattccgaggacacacccagcaggacccggaagtgcctaagtctttagtttccaatttgcggatccactgccctctgcttgcgggctctgctctgatcacctttgatgaccccaaagtggctgagcaggtgctgcaacaaaaggagcacacgatcaacatggaggagtgccggctgcgggtgcaggtccagcccttggagctgcccatggtcaccaccatccaggtgatgatgtccagccagttgagtggccggagggtgttggtcactggatttcctgccagcctcaggctgagtgaggaggagctgctggacaagctagagatcttctttggcaagactaggaacggaggtggcgatgtggacgttcgggagctactgccagggagtgtcatgctggggtttgctagggatggagtggctcagcgtctgtgccaaatcggccagttcacagtgccactgggtgggcagcaagtccctctgagagtctctccgtatgtgaacggggagatccagaaggctgagatcaggtcgcagccagttccccgctcggtactggtgctcaacattcctgatatcttggatggcccggagctgcatgacgtcctggagatccacttccagaagcccacccgcgggggcggggaggtagaggccctgacagtcgtaccccaaggacagcagggcctagcagtcttcacctctgagtcaggctaggggcctccccttctcatcctccccacccccccgccaaggttctcacactggcctgggcttgggtgcccatataggaggtctgtatgttcaccaacagtgcggaggggtcacacattgcaaaacactgcccagaacagtaaaaagagcctgcatgcca

SEQ ID NO: 169 - DNA, 3935 bp, Homo Sapiens
atctgcatccatattgaaaacctgacacaatgtatgcagcaggctcagtgtgagtgaactggaggcttctctacaacatgacccaaaggagcattgcaggtcctatttgcaacctgaagtttgtgactctcctggttgccttaagttcagaactcccattcctgggagctggagtacagcttcaagacaatgggtataatggattgctcattgcaattaatcctcaggtacctgagaatcagaacctcatctcaaacattaaggaaatgataactgaagcttcattttacctatttaatgctaccaagagaagagtatttttcagaaatataaagattttaatacctgccacatggaaagctaataataacagcaaaataaaacaagaatcatatgaaaaggcaaatgtcatagtgactgactggtatggggcacatggagatgatccatacaccctacaatacagagggtgtggaaaagagggaaaatacattcatttcacacctaatttcctactgaatgataacttaacagctggctacggatcacgaggccgagtgtttgtccatgaatgggcccacctccgttggggtgtgttcgatgagtataacaatgacaaacctttctacataaatgggcaaaatcaaattaaagtgacaaggtgttcatctgacatcacaggcatttttgtgtgtgaaaaaggtccttgcccccaagaaaactgtattattagtaagctttttaaagaaggatgcacctttatctacaatagcacccaaaatgcaactgcatcaataatgttcatgcaaagtttatcttctgtggttgaattttgtaatgcaagtacccacaaccaagaagcaccaaacctacagaaccagatgtgcagcctcagaagtgcatgggatgtaatcacagactctgctgactttcaccacagctttcccatgaatgggactgagcttccacctcctcccacattctcgcttgtacaggctggtgacaaagtggtctgtttagtgctggatgtgtccagcaagatggcagaggctgacagactccttcaactacaacaagccgcagaattttatttgatgcagattgttgaaattcataccttcgtgggcattgccagtttcgacagcaaaggagagatcagagcccagctacaccaaattaacagcaatgatgatcgaaagttgctggtttcatatctgcccaccactgtatcagctaaaacagacatcagcatttgttcagggcttaagaaaggatttgaggtggttgaaaaactgaatggaaaagcttatggctctgtgatgatattagtgaccagcggagatgataagcttcttggcaattgcttacccactgtgctcagcagtggttcaacaattcactccattgccctgggttcatctgcagccccaaatctggaggaattatcacgtcttacaggaggtttaaagttctttgttccagatatatcaaactccaatagcatgattgatgctttcagtagaatttcctctggaactggagacattttccagcaacatattcagcttgaaagtacaggtgaaaatgtcaaacctcaccatcaattgaaaaacacagtgactgtggataatactgtgggcaacgacactatgtttctagttacgtggcaggccagtggtcctcctgagattatattatttgatcctgatggacgaaaatactacacaaataattttatcaccaatctaacttttcggacagctagtctttggattccaggaacagctaagcctgggcactggacttacaccctgaacaatacccatcattctctgcaagccctgaaagtgacagtgacctctcgcgcctccaactcagctgtgcccccagccactgtggaagcctttgtggaaagagacagcctccattttcctcatcctgtgatgatttatgccaatgtgaaacagggattttatcccattcttaatgccactgtcactgccacagttgagccagagactggagatcctgttacgctgagactccttgatgatggagcaggtgctgatgttataaaaaatgatggaatttactcgaggtattttttctcctttgctgcaaatggtagatatagcttgaaagtgcatgtcaatcactctcccagcataagcaccccagcccactctattccagggagtcatgctatgtatgtaccaggttacacagcaaacggtaatattcagatgaatgctccaaggaaatcagtaggcagaaatgaggaggagcgaaagtggggctttagccgagtcagctcaggaggctccttttcagtgctgggagttccagctggcccccaccctgatgtgtttccaccatgcaaaattattgacctggaagctgtaaaagtagaagaggaattgaccctatcttggacagcacctggagaagactttgatcagggccaggctacaagctatgaaataagaatgagtaaaagtctacagaatatccaagatgactttaacaatgctattttagtaaatacatcaaagcgaaatcctcagcaagctggcatcagggagatatttacgttctcaccccaaatttccacgaatggacctgaacatcagccaaatggagaaacacatgaaagccacagaatttatgttgcaatacgagcaatggataggaactccttacagtctgctgtatctaacattgcccaggcgcctctgtttattccccccaattctgatcctgtacctgccagagattatcttatattgaaaggagttttaacagcaatgggtttgataggaatcatttgccttattatagttgtgacacatcatactttaagcaggaaaaagagagcagacaagaaagagaatggaacaaaattattataaataaatatccaaagtgtcttccttcttagatataagacccatggccttcgactacaaaaacatactaacaaagtcaaattaacatcaaaactgtattaaaatgcattgagtttttgtacaatacagataagatttttacatggtagatcaacaaattctttttgggggtagattagaaaacccttacactttggctatgaacaaataataaaaattattctttaaagtaatgtctttaaaggcaaagggaagggtaaagtcggaccagtgtcaaggaaagtttgttttattgaggtggaaaaatagccccaagcagagaaaaggagggtaggtctgcattataactgtctgtgtgaagcaatcatttagttactttgattaatttttcttttctccttatctgtgcagaacaggttgcttgtttacaactgaagatcatgctatattttatatatgaagcccctaatgcaaagctctttacctcttgctattttgttatatatattacagatgaaatctcactgctaatgctcagagatcttttttcactgtaagaggtaacctttaacaatatgggtattacctttgtctcttcataccggttttatgacaaaggtctattgaatttatttgtttgtaagtttctactcccatcaaagcagctttctaagttattgccttggttattatggatgatagttatagcccttataatgccttaactaaggaagaaaagatgttattctgagtttgttttaatacatatatgaacatatagttttattcaattaaaccaaagaagaggtcagcagggagatactaacctttggaaatgattagctggctctgttttttggttaaataagagtctttaatcctttctccatcaagagttacttaccaagggcaggggaagggggatatagaggtcacaaggaaataaaaatcatctttcatctttaattttactccttcctcttatttttttaaaagattatcgaacaataaaatcatttgcctttttaa

SEQ ID NO: 170 - DNA, 3182 bp, Homo Sapiens
cttttagtttctcttctttctaaagaaggctcgcggagcccggctggagaacctcaccctcgccgagcctagaaccgagagggggccaccccaggcggtcaccagcagatttgcccgcgcgttctctttctttccacccagttgcccttgcggccggctgtaaacctgccactaggacccggtcggtgagatctagcctcttgacctgagagccgagagtggatcgctgggctgggctaacggcgacggagagcgcgccctcgctgactccgggcgcgcccagcagtagcaccgcccgcgcccgcccctggacacttgtaagtttcgatttccgatttccgcggaaccgagtcccgcgccgcggcagagccagcacagccagcgcgccatggcggacccggaggtgtgctgcttcatcaccaaaatcctgtgcgcccacgggggccgcatggccctggacgcgctgctccaggagatcgcgctgtctgagccgcagctctgtgaggtgctgcaggtggccgggcccgaccgctttgtggtgttggagaccggcggcgaggccgggatcacccgatcggtggtggccaccactcgagcccgggtctgccgtcgcaagtactgccagagaccctgcgataacctgcatctctgcaaactcaacttgctgggccggtgcaactattcgcagtccgagcggaatttatgcaaatattctcatgaggttctctcagaagagaacttcaaagtcctgaaaaatcacgaactctctggactgaacaaagaggaattagcagtgctcctcctccaaagtgatcctttttttatgcccgagatatgcaaaagttataagggagagggtcggcagcagatttgtaaccagcagccaccgtgttcaagactccacatctgtgaccacttcacccgagggaactgtcgttttcccaactgcctccggtcccataacctgatggacagaaaggtgctggccatcatgagggagcacgggctgaaccccgacgtggtccagaacatccaggacatctgcaacagcaagcacatgcagaagaatcccccagggcccagagctccttcttcacatcgtagaaacatggcatatagggctagaagcaagagtagagatcggttctttcagggcagccaagaatttcttgcgtctgcttcagcgtctgctgagaggtcctgcacacctagtccagatcagatcagccacagggcttccctggaggacgcgcctgtggacgatctcacccgcaagttcacgtatctggggagtcaggatcgcgctcggcctccctcaggctcgtccaaggctactgatcttggaggaacaagtcaggccgggacaagccagaggtttttagagaacggcagtcaagaggacctcttgcatggaaatccaggcagcacttaccttgcttccaattcaacatcagcccccaactggaagagcctcacatcctggacgaatgaccaaggcgccaggagaaagactgtgttttctcccacgctacctgccgcccgctcttctcttggctctctgcaaacacctgaagctgtgaccaccagaaagggcacaggcttgctttcctcagactacaggatcatcaatggcaaaagtggaactcaggacatccagcctggccctctttttaataataatgctgatggagtggccacagatataacttctaccagatccttaaattacaaaagcactagcagcggtcacagagaaatatcatcacctaggattcaggatgctggacctgcttcccgagatgtccaggccactggcagaatcgcagatgatgctgacccaagagtagcacttgttaacgattctttatctgatgtcacaagtaccacatcttctagggtggatgatcatgactcagaggaaatttgtcttgaccatctgtgtaagggttgtccgcttaatggtagctgcagcaaagtccacttccatctgccttaccggtggcagatgcttattggtaaaacctggacggactttgagcacatggagacgatcgagaaaggctactgtaaccccggaatccacctctgttctgtaggaagttatacaatcaattttcgggtaatgagttgtgattcctttcccatccgacgcctctccactccttcttctgtcaccaagccagccaattctgtcttcaccaccaaatggatttggtattggaagaatgaatctggcacatggattcagtatggagaagagaaagacaaacggaaaaattcaaacgtcgactcttcatacctggagtctctctatcaatcctgtccgaggggagttgtgccatttcaggcgggctcacggaactatgagctgagtttccaagggatgattcagacaaacatagcttccaaaactcaaaaggatgtcatcagaagaccaacatttgtgcctcagtggtatgtgcagcagatgaagagagggccagagtaagtgttctgaagcagctgtttgctgacagatgcttgagatgttcatgccctgggctcatcaagtcactcgtgaatctggagcctgttttcctgaaaagttcctgtttgcattactctgcagtttccatttgcattatcgatgagtaagatgcttgttaagcagcatggtgtgactgaaaggatactagatcggaaaatgaattttctttctgaaagggaagtctgagcgagtctcctaaatactctgggctttagcttctccagctgtgaagagctggattgatgcagtacacctaaggaataatcatatatactgggtttttgttttgctgtggattcttttttttttttttttttttagagggggtctcactttgttgcccaggctggtcttgaactcctgagctcaagtgatcctcctacctcagtctcccaaagtgctgggattacaggcatgagccaccgtgcctggctttgctgtggattcttttgggtgtcttttgttttcctacacgatttatagaggatgaggggcggagaaagagatagaaaaaagggatgagctagctgttagagcaagggttttggtgagagataatattgattgaagggattttaaaggaaatgttgctgtgggggattcattgtaactctccttgtgaactgctcagtaaactctacattgttcatgaaca

SEQ ID NO: 171 - DNA, 2445 bp, Homo Sapiens
gctggactgcgccgccggagcgacgggcttcgggtcggtgcaaggcaggcgcacggggaagggcgcgccgcgcggccgccaccccaccatgctcaagcgctgcggccggcgcctgctgctggcgctggcgggcgcgctgctcgcctgcctgctggtgctcaccgccgacccgccgccgcctccactgcccgccgagcgcggccggcgcgcgctgcgcagcctggcgggccccgcgggggctgccccggcgcccgggctgggggcggcggcggcggcgcccggggcgctggtccgcgacgtgcacagtctgtccgagtacttcagcctgctcacccgcgcgcgcagagatgcgggcccgccgcccggggctgccccccgccccgccgacggccacccgcgccccctggccgagccgctcgcgccccgagacgtcttcatcgctgtcaagaccaccaaaaagttccaccgcgcgcgcctcgacctgctgctggagacctggatctcgcgccacaaggagatgacgttcatcttcactgacggggaagatgaggccctggccaggcacacgggcaacgtggtcatcacaaactgctcggccgcccacagccgccaggcgctgtcctgcaagatggccgtggagtatgaccgcttcatcgagtccggcaggaagtggttctgccacgtggacgatgacaactacgtcaacctgcgggccctgctgcggctgctggccagctacccgcacacgcgggacgtctacgtcggcaagcccagcctggacaggcccatccaggccatggagcgggtcagcgagaacaaggtgcgtcctgtccacttctggtttgccacgggcggcgctggcttctgcatcagccgtgggctggctctgaagatgagcccgtgggccagcgggggtcacttcatgaatacggctgagcggatccggctgcctgatgactgcaccatcggctacatcgtggaggccctgctgggtgtgcccctcatccgcagcggcctcttccactcccacctggagaacctgcagcaggtgcccacctcggagctccacgagcaggtgacgctgagctacggtatgtttgaaaacaagcggaacgccgtccacgtgaaggggcccttctcggtggaggccgacccatccaggttccgctccatccactgccacctgtacccggacacaccctggtgtccccgcactgccatcttctagtggccatggctgagacccaatccctgggcgcccctggtatccaaagggcccagggaccctgttgcgctgccctggcctcggcattcgaggctcccctagggccgtgcctgtgcgtgtgcgtgtgcgtgtgtgtgtgtgtgtactgcatgcccacccgggtagcaggctgctgggcagttctgctctgtggaggggcgggcaccagcgccacttatgtgcctctgctccgagggccagtgggctgcagggcctgcttggaggaaggatttgtgtgtcggaggccactccgagggcaattctgttaggatttttggatctttctacagctacggggctccgggctactttgcagggatgcgatgcgtaggtgcctttctcttcctgctgaccacaagctctgtgctgggggtacctgtgccctgaagtcctggcccctgtgtcatagccccaagtacgactcactgagccatgctcattgcaggggaggctgggtctgggggtgcgtgacccaatccccttcctcctggcctggacgctgtggcttaagagtaacagcagccaccgcccagttccagtggccccacgaagcccccagtggctggctgtccagctgggcaaacagtggcacccctcccagctcttctgagtggggagtcttccaggcctcctcagaggtcttccctttgcctccccaggacagggtgagtcagagctcagcatttaatctcctctccaaagtagagagcaagtcgcccacagtgggcgtgtctgtaaatattgtgacagtatttttttactgtgctgttttttttgaaaggggatgggtaaaaagtagggtgttcttgttttttgcttgggagggtgggggtgggggagggtcttattttatcttatcttttctgtggatcagaaaaaacagaagccaaactcggggtcatctttgtttttaaagctgaagtgggactgtctggcactctgtgtatttatgcgttccagcatctggaacctcccatccctgccctcctcctgtgtagctgccacctccccgctgggcccagcatggctcacctgtcccgtgggctgtgtttcttgttgtttttctctttgcaaagacatagctaggaaagcgaatgataagggaaaagttctcagggaattgaagtgttgttgctatggtgacgtccttttgctgtgaataaaggtgctctttgcagcaa

SEQ ID NO: 172 - DNA, 836 bp, Homo Sapiens
gacctgacgctatggagctctcggagttttgtgggggacggctgtgagtggggggttcctgctgcgggatgagaacgtagacgccagtggctcactcgctcctggcaccttccctttcaggctccagatggaccctgggaaggacaaagagggggtgccccagccctcagggccgccagcaaggaagaaatttgtgatacccctcgacgaggatgaggtccctcctggagtggccaagcccttattccgatctacacagagccttcccactgtggacacctcggcccaggcggcccctcagacctacgccgaatatgccatctcacagcctctggaaggggctggggccacgtgccccacagggtcagagcccctggcaggagagacgcccaaccaggccctgaaacccggggcaaaatccaacagcatcattgtgagccctcggcagaggggcaatcccgtactgaagttcgtgcgcaatgtgccctgggaatttggcgacgtaattcccgactatgtgctgggccagagcacctgtgccctgttcctcagcctccgctaccacaacctgcacccagactacatccatgggcggctgcagagcctggggaagaacttcgccttgcgggtcctgcttgtccaggtggatgtgaaagatccccagcaggccctcaaggagctggctaagatgtgtatcctggccgactgcacattgatcctcgcctggaggcccggaggctgtttgatgtcctgcacgagcccttcttgaaagtaccctgatgaccccagctgccaaggaaacccccagtgtaataataaatcgtcctcccaggcca

SEQ ID NO: 173 - DNA, 1359 bp, Homo Sapiens
aagggcacacatcttaggacccggaggacgtccggcctctgtgagccgcaacctttccaagggagtggttgtgtgatcgccatcttagggaatgttctcgtccgtggcgcacctggcgcgggcgaaccccttcaacacgccacatctgcagctggtgcacgatggtctcggggacctccgcagcagctccccagggcccacgggccagccccgccgccctcgcaacctggcagccgccgccgtggaagagcagtatagctgtgactatggatctggcagattctttatcctttgtggacttggaggaattattagctgtggcacaacacatacagcattggttcctctagatctggttaaatgcagaatgcaggtggacccccaaaagtacaagggcatatttaacggattctcagttacacttaaagaggatggtgttcgtggtttggctaaaggatgggctccgactttccttggctactccatgcagggactctgcaagtttggcttttatgaagtctttaaagtcttgtatagcaatatgcttggagaggagaatacttatctctggcgcacatcactatatttggctgcctctgccagtgctgaattctttgctgacattgccctggctcctatggaagctgctaaggttcgaattcaaacccagccaggttatgccaacactttgagggatgcagctcccaaaatgtataaggaagaaggcctaaaagcattctacaagggggttgctcctctctggatgagacagataccatacaccatgatgaagttcgcctgctttgaacgtactgttgaagcactgtacaagtttgtggttcctaagccccgcagtgaatgttcaaagccagagcagctggttgtaacatttgtagcaggttacatagctggagtcttttgtgcaattgtttctcaccctgctgattctgtggtatctgtgttgaataaagaaaaaggtagcagtgcttctctggtcctcaagagacttggatttaaaggtgtatggaagggactgtttgcccgtatcatcatgattggtaccctgactgcactacagtggtttatctatgactccgtgaaggtctacttcagacttcctcgccctcctccacccgagatgccagagtctctgaagaagaagcttgggttaactcagtagttagatcaaagcaaatgtggactgaatctgcttgttgatcagtgttgaagaaagtgcaaaaggaacttttatatatttgacagtgtaggaaattgtctattcctgatataattactgtagtactcttgcttaaggcaagagtttcagatttactgttgaaataaacccaactcttcatg

SEQ ID NO: 174 - DNA, 1530 bp, Homo Sapiens
cgaccccgggccacctgggcccccgggttccgccggcactctcgccaccaccgcgtgggtgcccaattacctgccctcggtgagctcagccatcggcggggaggtgccccagcgctacgtgtggcgtttctgcatcggcctgcactcggcgcctcgcttcttggtggccttcgcctactggaaccactacctcagctgcacctccccgtgttcctgctatcgcccgctctgccgcctcaacttcggcctcaatgtcgtggagaacctcgcgttgctagtgctcacttatgtctcctcctccgaggacttcaccatccacgaaaatgctttcattgtgttcattgcctcatccctcgggcacatgctcctcacctgcattctctggcggttgaccaagaagcacacagtaagtcaggaggatcgcaagtcctacagctggaaacagcggctcttcatcatcaacttcatctccttcttctcggcgctggctgtctactttcggcacaacatgtattgtgaggctggagtgtacaccatctttgccatcctggagtacactgttgtcttaaccaacatggcgttccacatgacggcctggtgggacttcgggaacaaggagctgctcataacctctcagcctgaggaaaagcgattctgaacccttcagtcctgcttgggaggacgcagcccactgcccagaaacaagaaacacgataccattctggccttccccaccccacatcctctcttggccttactgaagatgggggaagggtaagaaggaagggtgtaggccaaggctcaccccagtgctgctggcttctcctctccacccctcatatgggcgtggggtcctcaaacatcacctttacctgagaggccccaagaagctgagctggcagagagctccaccatttggtgctaaaaaaaaaaacgtcctgaggttcatgaccaccatccagtttctggcctttacacagtcacctttcactgaggtcaggagcccctgagcagtggctgctccctgacaaccacagccatttctctgcacgggggtcattcataggactaatgtatttcatgatctactgtgcacatccaggcctgtggccacagtcccctgctaaagttgctcaggtgttctagtcctgacttcacctttttgatttggtgtgtgccctagggtatgtacccttccccatctgagcctcggtgtgtccatgtgtctggcgggggatgggtggactgtatgatttccaaggactctaccagtcagtggttctgatgtcatcgggtggaggtggtgttctatacctaaaggatgacctgctccagaaacagcaccagcacagcatgtattttcttctcttctgaaagttctggcttgtagacccctcccctcctttgcaaaggtatgggatagaggggtcagatgcagatctctactgtaaaatgggctccctggtatctcctgtcttccctactgctccaaaccctaaattttggttgtacattttatttgaaaggaaa

SEQ ID NO: 175 - DNA, 1088 bp, Homo Sapiens
aacagacagcagcgactttaggctggataatagtcaaattcttacctcgctctttcactgctagtaagatcagattgcgtttctttcagttactcttcaatcgccagtttcttgatctgcttctaaaagaagaagtagagaagataaatcctgtcttcaatacctggaaggaaaaacaaaataacctcaactccgttttgaaaaaaacattccaagaactttcatcagagattttacttagatgatttacacaatgaagaaagtacatgcactttgggcttctgtatgcctgctgcttaatcttgcccctgcccctcttaatgctgattctgaggaagatgaagaacacacaattatcacagatacggagttgccaccactgaaacttatgcattcattttgtgcattcaaggcggatgatggcccatgtaaagcaatcatgaaaagatttttcttcaatattttcactcgacagtgcgaagaatttatatatgggggatgtgaaggaaatcagaatcgatttgaaagtctggaagagtgcaaaaaaatgtgtacaagagataatgcaaacaggattataaagacaacattgcaacaagaaaagccagatttctgctttttggaagaagatcctggaatatgtcgaggttatattaccaggtatttttataacaatcagacaaaacagtgtgaacgtttcaagtatggtggatgcctgggcaatatgaacaattttgagacactggaagaatgcaagaacatttgtgaagatggtccgaatggtttccaggtggataattatggaacccagctcaatgctgtgaataactccctgactccgcaatcaaccaaggttcccagcctttttgttacaaaagaaggaacaaatgatggttggaagaatgcggctcatatttaccaagtctttctgaacgccttctgcattcatgcatccatgttctttctaggattggatagcatttcatgcctatgttaatatttgtgcttttggcatttccttaatatttatatgtatacgtgatgcctttgatagcatactgctaataaagttttaatatttacatgca

SEQ ID NO: 176 - DNA, 3665 bp, Homo Sapiens
ccgacgacctcactcagctgcgttacgcgccgctccggctgccggccgcgcgccttgcccgccggctcccgcccgcaatcggcggctcagggcggacccgggtctctgcgttctcgcgagaagcgcggcgctgcggggccgtgggcgcctgagcccgcgcggccctcgagggccgaatatggggggatgcacggtgaagcctcagctgctgctcctggcgctcgtcctccacccctggaatccctgtctgggtgcggactcggagaagccctcgagcatccccacagataaattattagtcataactgtagcaacaaaagaaagtgatggattccatcgatttatgcagtcagccaaatatttcaattatactgtgaaggtccttggtcaaggagaagaatggagaggtggtgatggaattaatagtattggagggggccagaaagtgagattaatgaaagaagtcatggaacactatgctgatcaagatgatctggttgtcatgtttactgaatgctttgatgtcatatttgctggtggtccagaagaagttctaaaaaaattccaaaaggcaaaccacaaagtggtctttgcagcagatggaattttgtggccagataaaagactagcagacaagtatcctgttgtgcacattgggaaacgctatctgaattcaggaggatttattggctatgctccatatgtcaaccgtatagttcaacaatggaatctccaggataatgatgatgatcagctcttttacactaaagtttacattgatccactgaaaagggaagctattaacatcacattggatcacaaatgcaaaattttccagaccttaaatggagctgtagatgaagttgttttaaaatttgaaaatggcaaagccagagctaagaatacattttatgaaacattaccagtggcaattaatggaaatggacccaccaagattctcctgaattattttggaaactatgtacccaattcatggacacaggataatggctgcactctttgtgaattcgatacagtcgacttgtctgcagtagatgtccatccaaacgtatcaataggtgtttttattgagcaaccaaccccttttctacctcggtttctggacatattgttgacactggattacccaaaagaagcacttaaactttttattcataacaaagaagtttatcatgaaaaggacatcaaggtattttttgataaagctaagcatgaaatcaaaactataaaaatagtaggaccagaagaaaatctaagtcaagcggaagccagaaacatgggaatggacttttgccgtcaggatgaaaagtgtgattattactttagtgtggatgcagatgttgttttgacaaatccaaggactttaaaaattttgattgaacaaaacagaaagatcattgctcctcttgtaactcgtcatggaaagctgtggtccaatttctggggagcattgagtcctgatggatactatgcacgatctgaagattatgtggatattgttcaagggaatagagtaggagtatggaatgtcccatatatggctaatgtgtacttaattaaaggaaagacactccgatcagagatgaatgaaaggaactattttgttcgtgataaactggatcctgatatggctctttgccgaaatgctagagaaatgggtgtatttatgtacatttctaatagacatgaatttggaaggctattatccactgctaattacaatacttcccattataacaatgacctctggcagatttttgaaaatcctgtggactggaaggaaaagtatataaaccgtgattattcaaagattttcactgaaaatatagttgaacagccctgtccagatgtcttttggttccccatattttctgaaaaagcctgtgatgaattggtagaagaaatggaacattacggcaaatggtctgggggaaaacatcatgatagccgtatatctggtggttatgaaaatgtcccaactgatgatatccacatgaagcaagttgatctggagaatgtatggcttcattttatccgggagttcattgcaccagttacactgaaggtctttgcaggctattatacgaagggatttgcactactgaattttgtagtaaaatactcccctgaacgacagcgttctcttcgtcctcatcatgatgcttctacatttaccataaacattgcacttaataacgtgggagaagactttcagggaggtggttgcaaatttctaaggtacaattgctctattgagtcaccacgaaaaggctggagcttcatgcatcctgggagactcacacatttgcatgaaggacttcctgttaaaaatggaacaagatacattgcagtgtcatttatagatccctaagttatttacttttcattgaattgaaatttattttggatgaatgactggcatgaacacgtctttgaagttgtggctgagaagatgagaggaatatttaaataacatcaacagaacaacttcactttgggccaaacatttgaaaaactttttataaaaaattgtttgatatttcttaatgtctgctctgagccttaaaacacagattgaagaagaaaagaaagaaaaaacttaaatatttatttctatgctttgttgcctctgagaataatgacaatttatgaatttgtgtttcaaattgataaaatatttaggtacaaataacaagactaataatattttcttatttaaaaaaagcatgggaagatttttatttatcaaaatatagaggaaatgtagacaaaatggatataaatgaaaattaccatgttgtaaaaccttgaaaatcagattctaactggatttgtatgcaactaagtatttttctgaacacctatgcaggtcttatttacagtagttactaagggaacacacaaagaattacacaacgttttcctcaagaaaatggtacaaaacacaaccgaggagcgtatacagttgaaaacatttttgttttgattggaaggcagattattttatattagtattaaaaatcaaaccctatgtttctttcagatgaatcttccaaagtggattatattaagcaggtattagatttaggaaaacctttccatttcttaaagtattatcaagtgtcaagatcagcaagtgtccttaagtcaaacaggttttttttgttgttgtttttgctttgtttccttttttagaaagttctagaaaataggaaaacgaaaaatttcattgagatgagtagtgcatttaattattttttaaaaaactttttaagtacttgaattttatatcaggaaaacaaagttgttgagccttgcttcttccgttttgccctttgtctcgctccttattctttttttggggggagggttatttgcttttttatcttcctggcataatttccattttattcttctgagtgtctatgttaacttccctctatcccgcttataaaaaaattctccaacaaaaatacttgttgacttgatgttttatcacttctctaagtaaggttgaaatatccttattgtagctactgtttttaatgtaaaggttaaacttgaaaagaaattcttaatcacggtgccaaaattcattttctaacaccatgtgttagaaaattataaaaaataaaataatttta

SEQ ID NO: 177 - DNA, 582 bp, Homo Sapiens
agaagtccgccctgagaaaccaaggctgggctgctctcctggagccaggggagtccagtgagtgttttacatacaactctaggacctcagcagccatgtcgaagccccatagtgaagccgggactgccttcattcagacccagcagctgcacgcagccatggctgacacattcctggagcacatgtgccgcctggacattgattcaccacccatcacagcccggaacactggcatcatctgtaccattggcccagcttcccgatcagtggagacgttgaaggagatgattaagtctggaatgaatgtggctcgtctgaacttctctcatggaactcatgagtaccatgcggagaccatcaagaatgtgcgcacagccacggaaagctttgcttctgaccccatcctctaccggcccgttgctgtggctctagacactaaaggacctgagatccgaactgggctcatcaagggcagcggcactgcagaggtggagctgaagaagggagccactctcaaaatcacgctggataacgcctacatggaaaagtgtgacgagaacatcctgtggctggactacaaga

SEQ ID NO: 178 - DNA, 686 bp, Homo Sapiens
attttgtgcctgcctagctatccagacagagcagctaccctcagctctagctgatactacagacagtacaacagatagatggaagaaatagaaaagtgattatggacttaaagacaatggaaaatcttggacttgctcaaaattgtactatctctattcaggattatgaagtttttcgatgcgaagattcactggatgaaagaaagataaaaggggtcattgagctcaggaagagcttactgtctgccttgagaacttatgaaccatatggatccctggttcaacaaatacgaattctgctgctgggtccaattggagctgggaagtccagctttttcaactcagtgaggtctgttttccaagggcatgtaacgcatcaggctttggtgggcactaatacaactgggatatctgagaagtataggacatactctattagagacgggaaagatggcaaatacctgccgtttattctgtgtgactcactggggctgagtgagaaagaaggcggcctgtgcagggatgacatattctatatcttgaacggtaacattcgtgatagataccagtttaatcccatggaatcaatcaaattaaatcatcatgactacattgattccccatcgctgaaggacagaattcattgtgtggcatttgtatttgatgccagctctattcaatacttc

SEQ ID NO: 179 - DNA, 588 bp, Homo Sapiens
ggagattatgctccagtactgttttccacggctggatatcaatgtcagcaaaggaatcaatcatctactgaagagcccttttagtgttcatcctaaaacaggtcgcatatctgtgcctattgatttgcagaaagtggaccagtttgatccatttactgttccgaccataagcttcatctgccgtgaattggatgccatttccactaatgaagaggaaaaagaggagaatgaagctgaatctgatgtcaaacatagaaccagagattataagaagaccagtctagcaccttatgtgaaagtttttgaacattttcttgaaaatctggataaatcccgaaaaggagaacttcttaagaagagtggcttccttctgcaacaggcgtgggtcacgctctcgctcggtctttctgccgccatcttggttccgcgttccctgcacaaaatgcccggcgaagccacagaaaccgtccctgctacagagcaggagttgccgcagccccaggctgagacagggtctggaacagaatctgacagtgatgaatcagtaccagagcttgaagaacaggattccacccaggcaaccacaca

SEQ ID NO: 180 - DNA, 1052 bp, Homo Sapiens
acctctggtgccaaagggcggcgcagcggctgccgagctcggccctggaggcggcgagaacatggtgcgcaggttcttggtgaccctccggattcggcgcgcgtgcggcccgccgcgagtgagggttttcgtggttcacatcccgcggctcacgggggagtgggcagcgccaggggcgcccgccgctgtggccctcgtgctgatgctactgaggagccagcgtctagggcagcagccgcttcctagaagaccaggtcatgatgatgggcagcgcccgagtggcggagctgctgctgctccacggcgcggagcccaactgcgccgaccccgccactctcacccgacccgtgcacgacgctgcccgggagggcttcctggacacgctggtggtgctgcaccgggccggggcgcggctggacgtgcgcgatgcctggggccgtctgcccgtggacctggctgaggagctgggccatcgcgatgtcgcacggtacctgcgcgcggctgcggggggcaccagaggcagtaaccatgcccgcatagatgccgcggaaggtccctcagacatccccgattgaaagaaccagagaggctctgagaaacctcgggaaacttagatcatcagtcaccgaaggtcctacagggccacaactgcccccgccacaacccaccccgctttcgtagttttcatttagaaaatagagcttttaaaaatgtcctgccttttaacgtagatatatgccttcccccactaccgtaaatgtccatttatatcattttttatatattcttataaaaatgtaaaaaagaaaaacaccgcttctgccttttcactgtgttggagttttctggagtgagcactcacgccctaagcgcacattcatgtgggcatttcttgcgagcctcgcagcctccggaagctgtcgacttcatgacaagcattttgtgaactagggaagctcaggggggttactggcttctcttgagtcacactgctagcaaatggcagaaccaaagctcaaataaaaataaaataattttcattcattcactca

SEQ ID NO: 181 - DNA, 2433 bp, Homo Sapiens
tgggcagagcgggtggcggtagcggctgacctggtttcttgccttatctcgttgcgaaaggaggaaaaagttttcggcgcggatatgaacagtaatggcacatattttggttatgagtcactcagaggactgtggattgaatgaactgtatccatccccatcatgatgtacagaaccaagtctcttcactacacttgtgttctgattagtggccaaataaatgacagtcagaacttcagctaaggtacaataaggttttgctgtggcgtggcacctggtctctttctagaaggaaagttcaacatacagcacaattctggacacattgtattggtttgatgctcctacctggaacaggtggagctggtctcttgggcagcctgacatctggtccactcctctgtcctatgccgggatcatcatgaccgtagagattatgtcactgttttgcatccttgttacataactcagttcctggtagattactatgtcagagagtcacaatgaccttgcacaataacagtacaacctcgcctttgtttccaaacatcagctcctcctggatacacagcccctccgatgcagggctgcccccgggaaccgtcactcatttcggcagctacaatgtttctcgagcagctggcaatttctcctctccagacggtaccaccgatgaccctctgggaggtcataccgtctggcaagtggtcttcatcgctttcttaacgggcatcctggccttggtgaccatcatcggcaacatcctggtaattgtgtcatttaaggtcaacaagcagctgaagacggtcaacaactacttcctcttaagcctggcctgtgccgatctgattatcggggtcatttcaatgaatctgtttacgacctacatcatcatgaatcgatgggccttagggaacttggcctgtgacctctggcttgccattgactacgtagccagcaatgcctctgttatgaatcttctggtcatcagctttgacagatacttttccatcacgaggccgctcacgtaccgagccaaacgaacaacaaagagagccggtgtgatgatcggtctggcttgggtcatctcctttgtcctttgggctcctgccatcttgttctggcaatactttgttggaaagagaactgtgcctccgggagagtgcttcattcagttcctcagtgagcccaccattacttttggcacagccatcgctgctttttatatgcctgtcaccattatgactattttatactggaggatctataaggaaactgaaaagcgtaccaaagagcttgctggcctgcaagcctctgggacagaggcagagacagaaaactttgtccaccccacgggcagttctcgaagctgcagcagttacgaacttcaacagcaaagcatgaaacgctccaacaggaggaagtatggccgctgccacttctggttcacaaccaagagctggaaacccagctccgagcagatggaccaagaccacagcagcagtgacagttggaacaacaatgatgctgctgcctccctggagaactccgcctcctccgacgaggaggacattggctccgagacgagagccatctactccatcgtgctcaagcttccgggtcacagcaccatcctcaactccaccaagttaccctcatcggacaacctgcaggtgcctgaggaggagctggggatggtggacttggagaggaaagccgacaagctgcaggcccagaagagcgtggacgatggaggcagttttccaaaaagcttctccaagcttcccatccagctagagtcagccgtggacacagctaagacttctgacgtcaactcctcagtgggtaagagcacggccactctacctctgtccttcaaggaagccactctggccaagaggtttgctctgaagaccagaagtcagatcactaagcggaaaaggatgtccctggtcaaggagaagaaagcggcccagaccctcagtgcgatcttgcttgccttcatcatcacttggaccccatacaacatcatggttctggtgaacaccttttgtgacagctgcatacccaaaaccttttggaatctgggctactggctgtgctacatcaacagcaccgtgaaccccgtgtgctatgctctgtgcaacaaaacattcagaaccactttcaagatgctgctgctgtgccagtgtgacaaaaaaaagaggcgcaagcagcagtaccagcagagacagtcggtcatttttcacaagcgcgcacccgagcaggccttgtagaatgaggttgtatcaatagcagtgacaaaacgcacacatcaacccacagaccttaggaggaggaaggcgagggcggggtgacttctggtgatgataaaaatggttttatcacccagatgtgaaagaagctgcctgtttactgatccattgaataaac

SEQ ID NO: 182 - DNA, 5573 bp, Homo Sapiens
agtcccgctccgcgccgcgccgctccgctccggctcgggctccggctcgcctcgggctgggctcgggctccgggggcggcgtcccccgcgccgggccccgggacgggcggcgacgctccaaccatggcccgtgcccaggcgctcgtgctggcactcaccttccagctctgcgcgccggagaccgagactccggcagctggctgcaccttcgaggaggcaagtgacccagcagtgccctgcgagtacagccaggcccagtacgatgacttccagtgggagcaagtgcgaatccaccctggcacccgggcacctgcggacctgccccacggctcctacttgatggtcaacacttcccagcatgccccaggccagcgagcccatgtcatcttccagagcctgagcgagaatgatacccactgtgtgcagttcagctacttcctgtacagccgggacgggcacagcccgggcaccctgggcgtctacgtgcgcgttaatgggggccccctgggcagtgctgtgtggaatatgactggatcccacggccgtcagtggcaccaggctgagctggctgtcagcactttctggcccaatgaatatcaggtgctgtttgaggccctcatctccccagaccgcaggggctacatgggcctagatgacatcctgcttctcagctacccctgcgcaaaggccccacacttctcccgcctgggcgacgtggaggtcaacgcgggccagaacgcgtcgttccagtgcatggccgcgggcagagcggccgaggccgaacgcttcctcttgcaacggcagagcggggcgctggtgccggcggcgggcgtgcggcacatcagccaccggcgcttcctggccactttcccgctggctgccgtgagccgcgccgagcaggacctgtaccgctgtgtgtcccaggccccgcgcggcgcgggcgtctctaacttcgcggagctcatcgtcaaggagcccccaactcccatcgcgcccccacagctgctgcgtgctggccccacctacctcatcatccagctcaacaccaactccatcattggcgacgggccgatcgtgcgcaaggagattgagtaccgcatggcgcgcgggccctgggctgaggtgcacgccgtcagcctgcagacctacaagctgtggcacctcgaccccgacacagagtatgagatcagcgtgctgctcacgcgtcccggagacggcggcactggccgccctgggccacccctcatcagccgcaccaaatgcgcagagcccatgagggcccccaaaggcctggcttttgctgagatccaggcccgtcagctgaccctgcagtgggaaccactgggctacaacgtgacgcgttgccacacctatactgtgtcgctgtgctatcactacaccctgggcagcagccacaaccagaccatccgagagtgtgtgaagacagagcaaggtgtcagccgctacaccatcaagaacctgctgccctatcggaacgttcacgtgaggcttgtcctcactaaccctgaggggcgcaaagagggcaaggaggtcactttccagacggatgaggatgtgcccagtgggattgcagccgagtccctgaccttcactccactggaggacatgatcttcctcaagtgggaggagccccaggagcccaatggtctcatcacccagtatgagatcagctaccagagcatcgagtcatcagacccggcagtgaacgtgccaggcccacgacgtaccatctccaagctccgcaatgagacctaccatgtcttctccaacctgcacccaggcaccacctacctgttctccgtgcgggcccgcacaggcaaaggcttcggccaggcggcactcactgagataaccactaacatctctgctcccagctttgattatgccgacatgccgtcacccctgggcgagtctgagaacaccatcaccgtgctgctgaggccggcacagggccgcggtgcgcccatcagtgtgtaccaggtgattgtggaggaggagcgggcgcggaggctgcggcgggagccaggtggacaggactgcttcccagtgccattgaccttcgaggcggcgctggcccgaggcctggtgcactacttcggggccgaactggcggccagcagtctacctgaggccatgccctttaccgtgggtgacaaccagacctaccgaggcttctggaacccaccacttgagcctaggaaggcctatctcatctacttccaggcagcaagccacctgaagggggagacccggctgaattgcatccgcattgccaggaaagctgcctgcaaggaaagcaagcggcccctggaggtgtcccagagatcggaggagatggggcttatcctgggcatctgtgcaggggggcttgctgtcctcatccttctcctgggtgccatcattgtcatcatccgcaaagggaagccggtgaacatgaccaaggccaccgtcaactaccgccaggagaagacacacatgatgagcgccgtggaccgcagcttcacagaccagagcaccctgcaggaggacgagcggctgggcctgtccttcatggacacccatggctacagcacccggggagaccagcgcagcggtggggtcactgaggccagcagcctcctggggggctccccgaggcgtccctgtggccggaagggctccccataccacacggggcagctgcaccctgcggtgcgtgtcgcagaccttctgcagcacatcaaccagatgaagacggccgagggttacggcttcaagcaggagtatgagagcttctttgaaggctgggacgccacaaagaagaaagacaaggtcaagggcagccggcaggagccaatgcctgcctatgatcggcaccgagtgaaactgcacccgatgctgggagaccccaatgccgactacattaatgccaactacatagatggttaccacaggtcaaaccacttcatagccactcaagggccgaagcctgagatggtctatgacttctggcgtatggtgtggcaggagcactgttccagcatcgtcatgatcaccaagctggtcgaggtgggcagggtgaaatgctcacggtactggccggaggactcagacacctacggggacatcaagattatgctggtgaagacagagaccctggctgagtatgtcgtgcgcacttttgccctggagcggagaggctactctgcccggcacgaggtccgccagttccacttcacagcgtggccagagcatggcgtcccctaccatgccacggggctgctggctttcatccggcgcgtgaaggcctccaccccacctgatgccgggcccattgtcatccactgcagcgcgggcaccggccgcacaggttgctatatcgtcctggatgtgatgctggacatggcagagtgtgagggcgtcgtggacatttacaactgtgtgaagactctctgctcccggcgtgtcaacatgatccagactgaggagcagtacatcttcattcatgatgcaatcctggaggcctgcctgtgtggggagaccaccatccctgtcagtgagttcaaggccacctacaaggagatgatccgcattgatcctcagagtaattcctcccagctgcgggaagagttccagacgctgaactcggtcaccccgccgctggacgtggaggagtgcagcatcgccctgttgccccggaaccgcgacaagaaccgcagcatggacgtcctgccgcccgaccgctgcctgcccttcctcatctccactgatggggactccaacaactacattaatgcagccctgactgacagctacacacggagtgcggccttcatcgtgaccctgcacccgctgcagagcaccacgcccgacttctggcggctggtctacgattacgggtgcacctccatcgtcatgctcaaccagctgaaccagtccaactccgcctggccctgcctgcagtactggccagagccaggccggcagcaatatggcctcatggaggtggagtttatgtcgggcacagctgatgaagacttagtggctcgagtcttccgggtgcagaacatctctcggttgcaggaggggcacctgctggtgcggcacttccagttcctgcgctggtctgcataccgggacacacctgactccaagaaggccttcttgcacctgctggctgaggtggacaagtggcaggccgagagtggggatgggcgcaccatcgtgcactgcctaaacgggggaggacgcagcggcaccttctgcgcctgcgccacggtcctggagatgatccgctgccacaacttggtggacgttttctttgctgccaaaaccctccggaactacaaacccaacatggtggagaccatggatcagtaccacttttgctacgatgtggccctggagtacttggaggggctggagtcaagatagcggggccctggcctggggcacccactgcacactcagggccagacccaccatcctggactggcgaggaagatcagtgcctcctgctctgcccaaacacactcccatggggcaagcactggagtggatgctgggctatcttgctcccccttccactgtgggcagggcctttcgcttgtcccatgggcgggtggtgggccaaggaggagcttagcaagtctgcagcccagccccacctccatagggtcctgcaggcctgtgctgagaggcctggtgctgcctggcagagtgacaaaggctcaggacggctggctctgggggactcaggccaagccccttggcaccatcctggcttttggcagggatgagtgaggccctgcagagagcatcccaggccaaggttcccactcagcctgccccctctgcatgtgggtagaggatgtactgggacttggcatttaggattccatctggcccagcccctgaaggtcctggggaagcaggtctcaattctgaatagccagtggggcacactgactgtcctccccaggggaactgcagcgccctcctccccactgccccctgcagcccctgagatattttgctcactatccctccccacttgcttccctgatatgtgctctgagcttccctgaaccaggatctgcctattactgctgtgccccatggggggctccttccctgcctgacccactgttgcagaatgaagtcacctcgcccccctcttcctttaatcttcaggcctcactggcctgtcctgctcagcttgggccagtgacaatctgcaaggctgaacaacagcccctggggttgaggcccctgtggctcctggtcaggctgcccgttgtggggaggggcagtgttagagcagggctggtcataccctctggagttcagaggaagaggtaggaccagtgcttttttgtttcttttgttatttttggttgggtgggtgggaaggtctctttaaaatggggcaggccacacccccattccgtgcctcaatttccccatctgtaaactgtagatatgactactgacctacctcgcagggggctgtggggaggcataagctgatgtttgtaaagcgctttgtaaataaacgtgctctctgaatgcca

SEQ ID NO: 183 - DNA, 1332 bp, Homo Sapiens
gagccaacatggcagcggggttcgggcgatgctgcaggtgttctttacaggtcctgagaagtatttctcgttttcattggagatcacagcatacaaaagccaatcgacaacgtgaaccaggattaggatttagttttgagttcaccgaacagcagaaagaatttcaagctactgctcgtaaatttgccagagaggaaatcatcccagtggctgcagaatatgataaaactggtgaatatccagtccccctaattagaagagcctgggaacttggtttaatgaacacacacattccagagaactgtggaggtcttggacttggaacttttgatgcttgtttaattagtgaagaattggcttatggatgtacaggggttcagactgctattgaaggaaattctttggggcaaatgcctattattattgctggaaatgatcaacaaaagaagaagtatttggggagaatgactgaggagccattgatgtgtgcttattgtgtaacagaacctggagcaggctctgatgtagctggtataaagaccaaagcagaaaagaaaggagatgagtatattattaatggtcagaagatgtggataaccaacggaggaaaagctaattggtattttttattggcacgttctgatccagatcctaaagctcctgctaataaagcctttactggattcattgtggaagcagataccccaggaattcagattgggagaaaggaattaaacatgggccagcgatgttcagatactagaggaattgtcttcgaagatgtgaaagtgcctaaagaaaatgttttaattggtgacggagctggtttcaaagttgcaatgggagcttttgataaaaccagacctgtagtagctgctggtgctgttggattagcacaaagagctttggatgaagctaccaagtatgccctggaaaggaaaactttcggaaagctacttgtagagcaccaagcaatatcatttatgctggctgaaatggcaatgaaagttgaactagctagaatgagttaccagagagcagcttgggaggttgattctggtcgtcgaaatacctattatgcttctattgcaaaggcatttgctggagatattgcaaatcagttagctactgatgctgtgcagatacttggaggcaatggatttaatacagaatatcctgtagaaaaactaatgagggatgccaaaatctatcagatttatgaaggtacttcacaaattcaaagacttattgtagcccgtgaacacattgacaagtacaaaaattaaaaaaattactgtagaaatattgaataactagaacacaagccactgt

SEQ ID NO: 184 - DNA, 2021 bp, Homo Sapiens
gcagtgacaatttattttcctgcagcagcggcagcagggacggttgctgcaggttcggggtcggccggcctgcgcgtgggcttgcgaggacgctgttcgtcccctgcgctggggtgtccgacagcgaggaggagaacgacgcacggagcccgcgcgactggaaccagcaaagctccatctgtcggcagaggagaagggggaggaggcacggccgaggcaaacgagcggacgcctcgtcgccgggtgccggtatcaccccgctgcaacgccttccagcaaaagccaccgcggcccgggttgcagcagccggacggatgccaaggccacacggcagccacgggggcagccgtcgcagtcgccgtcccacacgggctgcggacaccaagggttgctaatgaagtgattgagaagaaacagtgaacatcctcatttcacagataagacaacatggatcagccttttactgtgaattctctgaaaaagttagctgctatgcctgaccatacagatgtttccctaagcccagaagagcgagtccgtgccctaagcaagcttggttgtaatatcaccatcagtgaagacatcactccacgacgttactttaggtctggagtagagatggagaggatggcgtctgtgtatttggaagaaggaaatttggaaaatgcctttgttctttataataaatttataaccttatttgtagaaaagcttcctaaccatcgagattaccagcaatgtgcagtacctgaaaagcaggatattatgaagaaactgaaggagattgcattcccaaggacagatgaattgaaaaacgaccttttaaagaaatataacgtagaataccaagaatatttgcaaagcaaaaacaaatataaagctgaaattctcaaaaaattggagcatcagagattgatagaggcagaaaggaagcggattgctcagatgcgccagcagcagctagaatcggagcagtttctgtttttcgaagatcaactcaagaagcaagagttagcccgaggtcaaatgcgaagtcagcaaacctcagggctgtcagagcagattgatgggagcgctttgtcctgcttttccacacaccagaacaattccttgctgaatgtatttgcagatcaacctaataaaagtgatgcaaccaattatgctagccactctcctcctgtaaacagggccttaacgccagctgctactctaagtgctgttcagaatttagtggttgaaggactgcgatgtgtagttttgccagaagatctttgccacaaatttctgcaactggcagaatctaatacagtgagaggaatagaaacctgtggaatactctgtggaaaactgacacataatgaatttactattacccatgtaattgtgccaaagcagtctgcgggaccagactattgtgacatggagaatgtagaggaattattcaatgttcaggatcaacatgatctcctcactctaggatggatccatacacatcccactcaaactgcatttttatccagcgttgatcttcacactcactgttcctatcaactcatgttgccagaggccattgccattgtttgctcaccaaagcataaagacactggcatcttcaggctcaccaatgctggcatgcttgaggtttctgcttgtaaaaaaaagggctttcatccacacaccaaggagcccaggctgttcagtatatgcaaacatgtgttggtaaaagacataaaaataattgtgttggatctgaggtgatatgttctgaatgtaagcaccgtcaacatcagacacctactcatggacatgtggttgccggattttcttaagatgtttccagaaatgactgatattttatatttatacattttagatgacaaagcttgatatttattgctgttgcacattttaaagttttctttttgggttgctctgtgtcaagagaggttacatggtgttaaatcggtacctgataatgtacccaaatactatggccagataataaattgtgctgcaaacaa

SEQ ID NO: 185 - DNA, 1053 bp, Homo Sapiens
atgttttgttgcttaggatatgaatggctgagcggaggctgtaaaacctggcactctgcttgggttatcaatactctggctgaccatcgtcatcgtgggactgactttggtggaagtccttggttacttatcattactgtgtttctgagaagttataaatttgccatctccctctgcacaagttacctttgtgtgtctttcctgaagactatcttcccgtctcaaaatggacatgatggatccacggatgtacagcagagagccaggaggtccaaccgccgtagacaggaaggaattaaaattgtcctggaagacatctttactttatggagacaggtggaaaccaaagttcgagctaaaatctgtaagatgaaggtgacaacaaaagtcaaccgtcatgacaaaatcaatggaaagaggaagaccgccaaagaacatctgaggaaactaagcatgaaagaacgtgagcacggagaaaaggagaggcaggtgtcagaggcagaggaaaacgggaaattggatatgaaagaaatacacacctacatggaaatgtttcaacgtgcgcaagcgttgcggcggcgggcagaggactactacagatgcaaaatcaccccttctgcaagaaagcctctttgcaaccgggtcagaatggcggcagcggagcatcgtcattcttcaggattgccctactggccctacctcacagctgaaactttaaaaaacaggatgggccaccagccacctcctccaactcaacaacattctataattgataactccctgagcctcaagacacctcccgagtgtctgctcactccccttccaccctcagctctaccctcagcggatgataatctcaagacacctgcggagtgtctgctctatccccttccaccctcagcggatgataatctcaagacacctcccgagtgtctgctcactccccttccaccctcagctccaccctcagcggatgataatctcaagacacctcccaagtgtgtctgctcactccccttccaccctcagcggatgataatctcaagaaactaa

SEQ ID NO: 186 - DNA, 3707 bp, Homo Sapiens
gggccggaggggcggggtgagaaggctgcgcgcgggtaaaggggccgcctcgagcgcggtccgagcgttcagcggacgcgcgcggcctcgatctctggactcgtcacctgcccctccccctcccgccgccgtcacccaggaaaccggccgcaatcgccggccgacctgaagctggtttcatggcagcctcaaagaaggcagttttggggccattggtgggggcggtggaccagggcaccagttcgacgcgctttttggttttcaattcaaaaacagctgaactacttagtcatcatcaagtagaaataaaacaagagttcccaagagaaggatgggtggaacaggaccctaaggaaattctacattctgtctatgagtgtatagagaaaacatgtgagaaacttggacagctcaatattgatatttccaacataaaagctattggtgtcagcaaccagagggaaaccactgtagtctgggacaagataactggagagcctctctacaatgctgtggtgtggcttgatctaagaacccagtctaccgttgagagtcttagtaaaagaattccaggaaataataactttgtcaagtccaagacaggccttccacttagcacttacttcagtgcagtgaaacttcgttggctccttgacaatgtgagaaaagttcaaaaggccgttgaagaaaaacgagctctttttgggactattgattcatggcttatttggagtttgacaggaggagtcaatggaggtgtccactgtacagatgtaacaaatgcaagtaggactatgcttttcaacattcattctttggaatgggataaacaactctgcgaattttttggaattccaatggaaattcttccaaatgtccggagttcttctgagatctatggcctaatgaaagctggggccttggaaggtgtgccaatatctgggtgtttaggggaccagtctgctgcattggtgggacaaatgtgcttccagattggacaagccaaaaatacgtatggaacaggatgtttcttactatgtaatacaggccataagtgtgtattttctgatcatggccttctcaccacagtggcttacaaacttggcagagacaaaccagtatattatgctttggaaggttctgtagctatagctggtgctgttattcgctggctaagagacaatcttggaattataaagacctcagaagaaattgaaaaacttgctaaagaagtaggtacttcttatggctgctacttcgtcccagcattttcggggttatatgcaccttattgggagcccagcgcaagagggataatctgtggactcactcagttcaccaataaatgccatattgcttttgctgcattagaagctgtttgtttccaaactcgagagattttggatgccatgaatcgagactgtggaattccactcagtcatttgcaggtagatggaggaatgaccagcaacaaaattcttatgcagctacaagcagacattctgtatataccagtagtgaagccctcaatgcccgaaaccactgcactgggtgcggctatggcggcaggggctgcagaaggagtcggcgtatggagtctcgaacccgaggatttgtctgccgtcacgatggagcggtttgaacctcagattaatgcggaggaaagtgaaattcgttattctacatggaagaaagctgtgatgaagtcaatgggttgggttacaactcaatctccagaaagtggtgaccctagtatcttctgtagtctgcccttgggcttttttatagtgagtagcatggtaatgttaatcggagcaaggtacatctcaggtattccataaaacctaccaactcatggattcccaagatgtgagctttttacataatgaaagaacccagcaattctgtctcttaatgcaatgacactattcatagactttgattttatttataagccacttgctgcatgaccctccaagtagacctgtggcttaaaataaagaaaatgcagcaaaaagaatgctatagaaatatttggtggttttttttttttttaaacatccacagttaaggttgggccagctacctttggggctgaccccctccattgccataacatcctgctccattccctctaagatgtaggaagaattcggatccttaccattggaatcttccatcgaacatactcaaacacttttggaccaggatttgagtctctgcatgacatatacttgattaaaaggttattactaacctgttaaaaatcagcagctctttgcttttaacagacaccctaaaagtcttcttttctacatagttgaagacagcaacatcttcactgaatgtttgaatagaaacctctactaaattattaaaatagacatttagtgttctcacagcttggatatttttctgaaaagttatttgccaaaactgaaatccttcagatgttttccatggtcccactaattataatgactttctgtctggatcttataggaaaagatactttcttttttcttccatctttcctttttatattttttactttgtatgtataacatacatgcctatatattttatacactgagggtagcccatttataaattaagagcacattatattcagaaggttctaacagggctggtcttaagtgaaccactgtgtatataaatatgttggaaaacagctgtatacatttttgggcaacggttatgcataatatttaccaggagaatttttttcttaacaagccaacatttaaaatttatgttttatgtcaataaaagaaaatatactttattgtgacttcaactatatttcttatcccttacatttttatttaattgtcttagcttaaaaaaagaagaaactgtggaatactacagtaaatattgttttcaaacacaagcaataattcaaatagttatttttcttttgaattaattttagacatattttggatcctattgaggggataagaggatgtcaaaaaagttaaatacctaagtagaaaaaaatatagaaataaagccaagaatctctttcagttcaaatgttatcaattgttaataagaaattgctatctgggatgacagaattacctctgcttagtatctcattataactgaaagaaggtttatcattacaaataccttccaatgaaaccaagaatttctcaaaatatttaatgtcacatattataagaagttacctaatcctgcttcttaacatcaatttttaaaaatatcttaaaattactttgttttgtagtaaacagtgaagaaaagattgcctcctaattatttttttcaatgagtgctgaatgggaaaacatttatatcttactataaaaggttctgttttgtttggaatcaatggtagctttattgactgttctgattgtgctgtttctaatttattgaatctgctaggttttattgatgcagccaccacttaagtgacataaatattatagaaaggtactgtgaaatgatcactttgtggcaggggtacttttaaacataaatgtttctacaaaagtaggttgagttcattgtaaataattgtgaaagccactgttcaaataattttaagattacattaatttttctataaattggaagatttataaatgtttgaaattgtacacattgatatttaatgacaaatttacttaaaataaattgaccccttgttctta

SEQ ID NO: 187 - DNA, 585 bp, Homo Sapiens
gctgctgcccaaggaccgcggagtcggacgcagggtaaacaggaggggccacatgcacaggtaattcaccagggagccgaacactcctgtgcagacagactccccttcccagcaagccatggcagcggacagcctgctgagaacacccaggaagcaggcggtgccagctgcaggcagaccatgtggaccctggtgagctgggtggccttaacagcagggctggtggctggaacgcggtgcccagatggtcagttctgccctgtggcctgctgcctggaccccggaggagccagctacagctgctgccgtccccttctggacaaatggcccacaacactgagcaggcatctgggtggcccctgccaggttgatgcccactgctctgccggccactcctgcatctttaccgtctcagggacttccagttgctgccccttcccagaggccgtggcatgcggggatggccatcactgctgcccacggggcttccactgcagtgcagacgggcgatcctgcttccaaagatcaggtaacaactccgtgggtgccatccagtgccctgatagtcagttcgaatgcccggac

SEQ ID NO: 188 - DNA, 1590 bp, Homo Sapiens
actttaaggagggctgtccaactgcaaggacgctgtaagcaggaagtgaaaccacagagcttcaaaaaaagagcgggacagggacaagcgtatctaagaggctgaacatgaatccacagatcagaaatccgatggagcggatgtatcgagacacattctacgacaactttgaaaacgaacccatcctctatggtcggagctacacttggctgtgctatgaagtgaaaataaagaggggccgctcaaatctcctttgggacacaggggtctttcgaggccaggtgtatttcaagcctcagtaccacgcagaaatgtgcttcctctcttggttctgtggcaaccagctgcctgcttacaagtgtttccagatcacctggtttgtatcctggaccccctgcccggactgtgtggcgaagctggccgaattcctgtctgagcaccccaatgtcaccctgaccatctctgccgcccgcctctactactactgggaaagagattaccgaagggcgctctgcaggctgagtcaggcaggagcccgcgtgacgatcatggactatgaagaatttgcatactgctgggaaaactttgtgtacaatgaaggtcagcaattcatgccttggtacaaattcgatgaaaattatgcattcctgcaccgcacgctaaaggagattctcagatacctgatggatccagacacattcactttcaactttaataatgaccctttggtccttcgacggcgccagacctacttgtgctatgaggtggagcgcctggacaatggcacctgggtcctgatggaccagcacatgggctttctatgcaacgaggctaagaatcttctctgtggcttttacggccgccatgcggagctgcgcttcttggacctggttccttctttgcagttggacccggcccagatctacagggtcacttggttcatctcctggagcccctgcttctcctggggctgtgccggggaagtgcgtgcgttccttcaggagaacacacacgtgagactgcgcatcttcgctgcccgcatctatgattacgaccccctatataaggaggcgctgcaaatgctgcgggatgctggggcccaagtctccatcatgacctacgatgagtttgagtactgctgggacacctttgtgtaccgccagggatgtcccttccagccctgggatggactagaggagcacagccaagccctgagtgggaggctgcgggccattctccagaatcagggaaactgaaggatgggcctcagtctctaaggaaggcagagacctgggttgagcagcagaataaaagatcttcttccaagaaatgcaaacagaccgttcaccaccatctccagctgctcacagacaccagcaaagcaatgtgctcctgatcaagtagattttttaaaaatcagagtcaattaattttaattgaaaatttctcttatgttccaagtgtacaagagtaagattatgctcaatattcccagaatagttttcaatgtattaatgaagtgattaattggctccatatttagactaataaaacattaagaatcttccataattgtttccacaaacacta

SEQ ID NO: 189 - DNA, 3863 bp, Homo Sapiens
gccagacctgctcttgctgctgctcaggtagaacatctgggaggtcccttgctgaccactggaagaagatgagctcgagctattggagtgagacgagcagcagcagctgtggaacccagcagctcccagaggtgctgcagtgccagccccagcattaccactgctaccatcagtcaagccaagcccagcagcctccagaaaaaaatgtagtgtatgagcgagtgaggacctacagtgggcccatgaacaaggtggtgcaggccttggaccccttcaactcacgggaagtgctctcccctctcaaaaccacctcctcctaccaaaatttggtttggagcgaccattctcaggaactccattctccaactttaaaaatatctacatgtgccccaagtactctacatataacccaaaatactgaacaggaacttcattctccaacagtgaaacttactacatatccacagaccactattaggaaatatgtagtacaaaatcctgaacaggaaccactgtctcaattcctaagaggaagccatttcttcccaggaaacaatgttatttatgaaaaaacaataagaaaagtggagaagctaaatactgatcaggggtgccatcctcaggctcaatgccatcatcacattatccaacagccccaggtcatccactctgcacactggcaacaacctgattctagccagcaaatccaagccatcacaggaaataatccaatttctacacatattggaaatgaactgtgccatagtggatcaagccagatttgtgagcaggtgataattcaggatgatggccctgaaaaattggaccccagatattttggagagttgcttgctgatctgagccgtaagaatacggatctatatcactgcttattagaacatttgcagagaattggaggaagcaaacaggactttgagtctacagatgagtcggaagacattgaatcattgattcctaaaggattatcagagtttacaaaacagcaaatacgctacattctgcagatgaggggtatgtctgataagtcactccgactagtgctgtccacatttagcaacatacgggaggagcttggacatcttcaaaatgatatgacatcactggaaaatgacaagatgagacttgagaaagatttatcattcaaagacactcaattaaaagagtacgaagaactcttggcatcagtgagagcaaataatcaccagcagcagcaaggacttcaagactcaagttcaaaatgccaggcattggaagaaaacaatctctctcttcgacatacactatcagacatggaatacagactaaaagaactggaatattgtaaacgtaatttagagcaagagaatcaaaaccttagaatgcaggtttctgagacttgcacaggcccaatgttgcaggctaaaatggatgagattggcaaccactacacggagatggtaaaaaacttgagaatggagaaagatagagagatctgcagactgaggtcccaattaaaccagtaccataaagatgtttcaaagagagaaggaagttgtagtgacttccaatttaagcttcatgaactgacaagcttgctggaagagaaggattccctcataaagcgtcagtcagaggaactctccaagttgcggcaagaaatatattcctctcataaccaaccctccactggtggaaggactactattaccactaaaaagtacaggacacaatatccaatcctaggcctcctatatgatgactacgaatatataccaccaggtagtgaaacacagactattgtgattgagaaaacagaagacaaatacacttgtccatgaatggatccactttaaagtattacaactcaaagccgttttttttttgtgtgtgtgtctctgcattagtactttgttatttttccatcactaaaggccaatcagaatttggaaccatgctgctacccaagaaatctaatggaatgaattagttctgtagatgacaatttcttcacccatttatgagacctaaatcttttccataacactcatgtattcagtataacaacatactaactgaaagagggacctgattgtttaaagtttgattgcagacactgtagaacataactcattatgtttcagataaggtaactcctagatatcaaactaatttgttggggtagagattttacaagtcatgccattagaagattttctctgatattatatgtgcagttcagttacaagatgaaatcatgtttttttaacaaaagagataaaatacaattgaagcaaaaaataacagctagtatataatatatacagtctgtatttgcttttcacagtaggcctgatgactaaaagatatgctttattacacgctattttcacctcttgaaagtcaaaggtgatgattaatttcatttagcagggaagtggaataatatcttttgaaataactaagtccactaaattatacagtatgctattctggttctaagtacatattagtcccttggcaaatctgttctttcaaagcataccttccccaaatgagcctacctacttcttaaaaaacatataacacaatgtggtagtagtaggtgtaaggaaggtaagttttttcatagtggtatgcaaacatatcattgaaatattacatagatataaagacttagggaataaaaatagcagcaacaaatacttgatagatttatcctacttgggagaaatattttgtagcagagtatttagtatacttagaagttgatttagcaattaggctttaatgaccttacaaagtgaacataactgaacacaagtattttttcaatgcaagatgaggatgaaaattttacatttcaacccatctggctaaagttaagacttagcaaaaattaaaatgttgcctttgtccaagtatagattaaggcaacaaacatatttgggtgtgtaatttgaagttttggactgaaatatctttgcaagtatccacataaaattctgtaatgccttataattatattctaataattatgcattatactaagacaccattaagaacagttgaggcactacactaaatcaaaccataaatgaggaaaaaacttttaatgttcttttctagaagtgttcaaataggtcttgatatgaagctaaaagccttatttatattatcttaatatttcggctaaaatgttaagctccataacatgaattgatacaattccaattttatcaatattttgtgatagaaaaatgttaatattattcatgagctatacagtccttacattttttcccttggtgtaggaacaacggaggagtttctcctctgctaactattcatatatgtaactgtaacaaaagtgtactatgttatgcacacattacaaataatataaggggaagttttattagcttagtaggaaattgttattattaaggtttaaaaatgagaacaggtgtgagttttccaaaatacttaaaaataatagtgtcaaaaattcaggggcagttaaggagtcatggatggaactagaggtcactatattaagtgacataagccagaaacagacaaacattgcatgttctcaattatttgcgggatctaaaagtcaaaacaattgaactcatggatatagagagtagaaggatggttactagtggctgggaaaaggggtgtgcgaggggaactggggatgcttaatgtgtacaaaaactatgtagttagaaagtataaataagacctagtatttgatagcacaaccgggtgagtatagtcaataatagcttaattgtacaaataactaagagtataattggattgtttgtaacacaaataaatacttgagtggatggata

SEQ ID NO: 190 - DNA, 6971 bp, Homo Sapiens
agttggttaggctgccttcgcttctcaaggtaaggaagtggaggattaaatgatttgcccaaagtctcacagtaatttgtagagctgagattgaaattcgggtgaaacttcacatatcacattctttttatcagatggcagtttctggatttactcttggtacctgcatacttctgttgcacattagttatgtggctaattatcccaatggaaaagtaacacagtcatgccatggaatgattcctgaacatggtcatagtccacagtctgttcctgttcatgacatttacgtgagtcagatgacattcaggccaggagatcagattgaagttactttgtcagggcatccatttaaaggctttctcctagaagcgcgtaatgctgaggatctgaatggccctcctattggctccttcacattgattgacagtgaagtgtcacaacttttgacctgtgaagatatacagggatcagcagtgagtcacagaagtgcatctaaaaaaacagaaattaaagtctactggaatgctccaagcagtgctccaaatcacacacagtttctagtcacagttgttgagaagtataaaatctactgggtgaagattcctggtcctataatttcacaaccaaatgcatttccttttacaacacctaaagctacagtagtacctttgccaacgttacctcccgtttcccacttaaccaaaccattcagtgcctcagattgtgggaacaagaagttctgtattaggagtcctttgaactgtgacccagagaaggaggcttcctgtgtcttcttgtccttcacaagagatgaccaatcggtgatggttgaaatgagcggccccagtaaaggctatttatcctttgcattgtctcatgatcagtggatgggtgatgatgatgcttatctgtgtattcatgaagatcagactgtgtacatccagccttcccatttaacggggcgaagtcaccctgtaatggactccagggatacccttgaggatatggcttggaggttggcggacggtgttatgcagtgttctttcagaagaaacattacccttcctggagttaagaatagatttgatctaaacacaagctattacatatttctagcagatggtgcagctaatgatggtcgaatttacaagcactctcagcaacctttgattacctatgaaaaatatgatgtgacagactctccaaagaacataggaggatcccattctgtactccttctgaaggttcatggtgccttaatgtttgtggcatggatgactactgttagcataggtgtactggttgcccggttcttcaagccagtttggtcaaaagctttcttgcttggtgaagcagcttggtttcaggtgcatcggatgctcatgttcaccacaactgtcctcacctgcattgcttttgttatgccgtttatatacaggggaggctggagtaggcatgcaggttaccacccatacctcggctgtatagtgatgactttggcagttcttcagcctcttctggcagtcttcaggccacctttacatgacccaagaaggcaaatgtttaactggactcattggagtatgggaacagctgctagaataatagcagtggcagcgatgttcctgggaatggatttaccaggactgaatcttcctgattcatggaaaacctatgcaatgaccggattcgtagcctggcatgttgggactgaggttgttctggaggtacatgcttatcggctctctcgcaaagttgaaatattggatgatgacagaattcagatccttcagtcatttactgcagtggaaacagagggtcatgcttttaaaaaggcagtgttggcaatttatgtctgtgggaatgttacttttctcatcatatttttatctgcaatcaaccatctatgagcaagcaaagaccttggcttttgcaggccaagtgataattatcatcaaaccaaagaaacttgaagcctgtcctgactgcctggagcatatttgtgaattctcacttggaagactggggtcatgtctgtagaggaattctgaagtccagcctttagagaacaacattcaagagggtcatatagactataaattaatgtcatgccctatatgtaattctgggtcttaaaggaaagattgtacttcaggagaagtaactctcaaatatttcatgccaagattttaagaatgttggtatttaagaaaataaatagtgatttggaaaatcacaacagatgtcactaggataataaagagatatattacgatatatatatatatatatatatatatatatatatatatttttttttttttttttttttttttttttgagacagagtcttgctctgtcgcccaggctggagtgcagtggtgcaatctcggctcactgcaagctctgcctcctgggttcacaccattctcctgcctcagcctcctgagtagctgggactacaggtgcccgccaccatgccgggctaattttttttatatttttagtagagacagggtttcaccattcacaggatggtctcgatctcctgaccttgtgatctgcctgcctcagcttcccaaagtgctgggattacaggcgtgagccaccacgcccagcctatggtaaatatattttgaactacaaaggtgctgtggtactttaaagaaaaactatttttactagtttatctgaatggtctgtggactttatttagaaactgtttttcagtttagttttttggacatatcctttgctcagtgtattttgttacttctctagtaaaggtagaagtgaagcagatgccattgtaggttttaccagcatttaaatatattatgaattgcttagcaatgaaatgcaagtatgcatcttttacttaaagatactatttatgtattcagctacagagatgaaatagcattttatgtgttaattgttttggctataaaatttaagtccttacagcatttggggattatacacttggatttcaaaattgataaaacccttgtgaacatatctaatagatattctgtttacttgtagaaataatataatgtgtctggttctgttttgttagacattttttatgttctactgaatcagaatagtcagtgttatattccttatttcaagaattcatctattttatggctacatctcatatgtgctatgaggacttctagccagtgggtggcgctgtaataccgaagtactgcactgctttgttcctgtttccttgtgctgattcctttctagtatttaggtaacattaccggatggcatttcccttaaattccaccaactcttaatctttattttaaaaatggctactttttttgggtggttggggtaagggttaaaaccttaaattagtaaccgctgtttattttccagtttatttgttttctgtgattatttataataattgatatttgtttttacaagtcccctgaccctgtaataatgaatgcagctatcttaggcaaagcaaataaataaactgggcatttttaaaataaaaaatttaggaagtcatactttatttctttaggtattctttctgattatgttatagtttctgcttggcccgagaacctaatttctatatggtgtgaataatagcctcagctatgtagcctacatctttattttattaatatttttcaaaaattttctcattatttcttttttatatttttattttttgaatttacttaaccaactttctactaatagcctacatcttttactgggtaaaataatgtggaagtttagtttttgttccttttataggtgtttatcataagtggcttagggcttagatatgaactttctgtgttcatattctatatgtgccatgctacttataatctaaattttccttttgaaggtctttattaaaaaaatttagtatagcaaattaagtgtgtactaaagttattttcctccagttttctatactaaggagcttaaatgttaataaatttctcttaagttatattctacatctgacaaagaaaaattctctcttttttttttttgtgacaaagtctcactctgttgtctaggctggagtgcagtggtgcaatgttggctcactgcagcctccacctcctgggttcaagcgagtcttgtctcagtctcctgaatagctgggactacaggtgtgcaccaccagtctcggctaatttttatatttttagtagagacgggggtttcacattttggccaggctggtcccaaactcctggtctaaagtaatccacccgcctcagcctcccaaagtgctgggattacaggcacgagccactgtgcccagctgaaaattcttttaagggaaagatgagtcttgatgtgtttggtcttcaaatatgtgggcttgctatatttcgagtgttgaggctaagatattttaactttttctttttcagtgcttcatatgttggcactattttggtctttgccaacttacatacagagttccccgaataagcctttgcatttaatcttttttttttttttttgagacagggtcttactctgttgcccaggctggagtgcagtggtgcgatcttagcccactgcagccttgacctcttgggctttagtgatcctcccactgcagcctccagagtagctggaactacaggcaccaactccgtgcaccaccacagccagctaattaaaaaaaaatttttttttttttttggtagagaagggatctccctttgttgcccaggctgatctcgaactcctgggctcaagcaatccccttgcctcagactcccaaagtgttgggattataggcatgagccattgcacctggccccaaatagaccaaatcttttgattagaaccaaattattcttcttctgcttatgggtggttggtatccacaaattgcaaatgcctagtcttcactcctctcagtttttctttttgtttctgtaataaacactctgggaagtttttcaaaagttatttcttttgatagtaattattgttaaattaaatgcttttatatctttagcaatgttgccaaaaacaatgagcaaaatcatgttttcttctaaagaagtgatgcaatatgaaataaagatgtgtgtgcttttcagaaagaaatgaaagaaattctagaaaattgtggttgggctggcattaatagctgaggcaataaaaaaattctctggtctgcagaaatcaatcttaagggcaaaggtagtctatagtatgggttatcaagtaaatgaatcaaattcactttagtactttatttttgtcaaggattttgtctctaatgtgtgttaagcaatacctcatcccttccacatcctgcaccagtccaggctgcagtgggaaaagacaaatgcagcagatgccaactaggaagctctcagggcacatgtagtgtttggctgaaattctatttatctgtatattctcatgaggcagggaaaaaaagaacaaaggtccttgtttaagataatccattataggttggaatgaaaggaaagattcttctaagagtcctttttaaatcagattaggatattcacagttcctatccacatcctgcttctttcttccttgtgcagcccctaccaagctcatctctgcacccaggtcacagatggttaccagcctggaatgcccttctcagtgaaacgggaaatgttcccttgtcccccttgcagggtgtggaatggggatgtggctggcttcttcagtgccccactgctcaaatctaggggagcatacagatgggcaggctgtggggctccgaccccacagcaatgtctaggggtgaatgtttgcagctgaagccccagtgggcatgtgttaccacgtgctcttttagtttagctgtccatagttagcttgtgttagctcaattagacccctgccttattgcaaggacagagggctttctgtatccctgggttcttgccttggtgtaccaggagaatcggatcacacctgggcttgaagaacgagtgcaaggttttactgagtagaagtagctctcagcagatgggggagccagaagggagatggttttcccctggagttgggccgctagactgcctgggctctcctctgattgccccggccaaactccgccaactgttcctccttccgccagtcgtggcctgtcggcatgctgggatctgtcgtgtgctcttcctctggcgtgctcccatccacatcctctcgctgtccagctgcttgtgtcttctgcgatgtgttcctctccacgtccagctgcttgtgtgtctgcctgctagaatcttggaggtttttataggcacaggatgggggcgtggtgagccagggtggtcttaggaaatgcaacatttgggcgctgaaggcaggggtgcctgtcctcacttagacccgtgggcacgggtttgggggtggagccctcgccagggaccacgccctcctctacccagcacttcctttccctcctttcctgttatttaaagggaccacgcccttcccagcacttccctcccgttatcacttacaaaagctagtttatcaagttctagctccttccctgacttgctgtccaacattggtatctttttgttttgaccatccttataaatgggatgggaggcagctgatcctgtaaattaaaaaggactggaaattagaagacctgaatgtgcatgtttgcttgttggtttacaagctgcatgtccttgggtaagtcacttatcttccctgggctctattctttcatctgtaaagcccatctcacagagcagctgtgaggatccaatgaagtgatgccagcaaaaggtgcttgcttcgtacatgtttttgatgatgtctttgccatttgattgcagtgttaaacttaataaattttgcatgtaaaatgtatactttttataaaaaatatttgatattcatcttgaaaacattatgctgaataaaataaagcagacgcagga

SEQ ID NO: 191 - DNA, 715 bp, Homo Sapiens
cacaaacaagtgcattttctagaatcatgaaactttgtgaagaaaaatgtgaaacagatgaaatacagaagggaggaaaatgcagaaatttatctgtaagaggaattacaaatttaggaaatacttgcttttttaatgcagtcatgcagaacttggcacagacttatactcttactgatctgatgaatgagatcaaagaaagtagtacaaaactcaagatttttccttcctcagactctcagctggacccattggtggtggaactttcaaggcctggaccactgacctcagccttgttcctgtttcttcacagcatgaaggagactgaaaaaggaccactttctcctaaagttctttttaatcagctttgtcagaaggcacctcgatttaaagatttccagcaacaggacagtcaggagcttcttcattatcttctggatgcagtgaggacagaagaaacaaagcgaatacaagctagcattctaaaagcatttaacaacccaactactaaaactgctgatgatgaaactagaaaaaaagtcaaagatctccacggtgaaagatccattcattgatatttcacttcctataatagaagaaagggtttcaaaacctttactttggggaagaatgaataaatatagaagtttacgggagacagatcatgatcgatacagtggcaatgttactatagaaaatattcatcaacctagag

SEQ ID NO: 192 - DNA, 1485 bp, Homo Sapiens
agattcagcagcggcagcagctggagaaggtcgtggagcagcaccttgcctgcagggtgttctgagaatcagccatgtcatccctgtacccatctctagaggacctaaaagtggaccaagccattcaggcccaggtcagagcctcacccaagatgccagccctgccagtccaggcaacagccatttccccaccaccagttttgtacccaaacttggcagaactggaaaattatatgggtctttccctctccagccaagaagtccaggagagcctgcttcagattccagagggtgacagtacagcggtctcgggccccgggcccggccagatggtggcaccggtaaccgggtacagcctgggcgtgcggcgagctgagatcaagcccggggtgcgcgagatccacctgtgcaaggacgagcgcggcaagaccgggctgaggctgcggaaggtcgaccaggggctctttgtgcagttggtccaggccaacacccctgcatcccttgtggggctgcgctttggggaccagctcctgcagattgacgggcgtgactgtgctgggtggagctcgcacaaagcccatcaggtggtgaagaaggcatcaggcgataagattgtcgtggtggttcgggacaggccgttccagcggactgtcaccatgcacaaggacagcatgggccacgtcggcttcgtgatcaagaaggggaagattgtctctctggtcaaagggagttctgcggcccgcaacgggctcctcaccaaccactacgtgtgtgaggtggacgggcagaatgttatcgggctgaaggacaaaaagatcatggagattctggccacggctgggaacgttgtcaccctgaccatcatccccagtgtgatctacgagcacatggtcaaaaagttgcctccagtcctgctccaccacaccatggaccactccatcccagatgcctgaagccactgcagggcagggcaggcagggggggcttcccgccctcctgcagcaaagggcaaccaccctcggatgatgggttgcagccggcctgctgcttaaggtgggggctgccatgaggggggcgtgtccaggagggtgaccatgggatggcttatacacacaggcctccttggagcctcagactccaagctaggctgaggctcaggcagggcccacaggcagccgattctcttgtgctgatttaaatgctggacacggaggcaggctgtttaaacgctgcttaaagtcgcaactgggcccctttcaagaaattttgctctaccaggaaaacagttacacattttaagagaacagagctacgttctttgtgagagctttttccttgccttgacttgctctttgtcacagactgcataagttgtcagccttgactatcttttgaataaagatttgattttaaacaaaaccctgtccgcaaaggtaattgattcccccaaaactattgaaaataaaataaaaaggtaactgaaaa

SEQ ID NO: 193 - DNA, 1689 bp, Homo Sapiens
ctcagctgccttgcacagcctcgcaatgagctgccacaactgctccgacccccaggtcctttgcagctccgggcagctgttcctgcagcccctctgggaccacctgaggagctgggaggccctcctacagtcgcccttcttcccggtcatcttctccatcaccacatacgtgggcttttgcctgcccttcgtggtcctggatatcctgtgctcctgggtgcccgccctgcggcgctacaagatccaccctgacttctcgccatccgcgcagcagctgctaccttgcctggggcagaccctctaccagcatgtgatgtttgtgttccccgtgacgctgctgcattgggcccgcagcccggccctcctgccccacgaagctcccgagctgctcctgctgctgcaccacatcctgttctgcctgctactcttcgacatggagttcttcgtgtggcacctgctgcaccacaaggtgccctggctgtaccgcaccttccacaaggtgcaccaccagaactcgtcctcgttcgcgctggcaacgcagtatatgagcgtctgggaactgttttctttgggcttcttcgacatgatgaacgtcacactgctcgggtgccacccgctcaccaccctgaccttccacgtggtcaacatctggctttccgtggaggaccactccggctacaacttcccttggtccactcacagactggtgcccttcgggtggtacgggggtgtggtgcaccacgacctgcatcactctcactttaactgcaacttcgctccgtactttacacactgggacaaaatactgggaacgctgcggactgcatctgtcccagcgcggtgatgtggctgcggtgggtgcccctaagactcgggactgctgtgcctttcacacttgaatgaagagaaacacctgagctatatatttttttaaagcaactaacttattgctttatgtttatctatgaaaaccatagataaaatctgatgcatttttgtaatctgacaaagtaatttacatactgtttgtgtatcaatacaattttgtgttcttggtattcttagtctagctcacctcaatagccttgaatcctgcatatgaattagacattcatcactggcatatttagaatatctctaaaaggacttgtttgtagaataaggaattttctatgtttcaaagtgttctaaaacctggctaaaagaatgtatttttgtggatggtgttgacttctgactctaaaagcaatcaaacatgtttctgctggacagtgaccaagaattatagtaccttcttatatttttttatagaactgtatatttattttgaaagaaatgttattcgtgctttaaaaaggaaaaaaaaccatgaatcaaataagtattgacttccgtttcactggtattttgactgataaaaaagggaagagggagcgggcataccaagtgtccttctaagcctccatcagcctcaccatggaaagagaggaatctgggtgtagggtgttctgttgggggttgttagagaaaaggaggcaggagaaggggctctgtttgttgtgctctagcaatttcatggaggaaaaacacgctaatattcttaatgcttttcagctgatttctgtataacaggcaaatgataggattactctgtaaagtttcatagaaagattaacgctgagcagtcaa

SEQ ID NO: 194 - DNA, 2560 bp, Homo Sapiens
agtcggtctcgccgcgctcgccgggtgtcccagtgtcaccaacactcggccgccgccgccagcttggcgcgcaccgccgcctccgccaccgccgacagcgcgcatcctccgtgtccccgctccgccgcccgagcaggtgccactatgcacgtgaagaagtacctgctgaagggcctgcatcggctgcagaagggccccggctacacgtacaaggagctgctggtgtggtactgcgacaacaccaacacccacggccccaagcgcatcatctgtgaggggcccaagaagaaagccatgtggttcctgctcaccctgctcttcgccgccctcgtctgctggcagtggggcatcttcatcaggacctacttgagctgggaggtcagcgtctccctctccgtaggcttcaagaccatggacttccctgccgtcaccatctgcaatgctagccccttcaagtattccaaaatcaagcatttgctgaaggacctggatgagctgatggaagctgtcctggagagaatcctggctcctgagctaagccatgccaatgccaccaggaacctgaacttctccatctggaaccacacacccctggtccttattgatgaacggaacccccaccaccccatggtccttgatctctttggagacaaccacaatggcttaacaagcagctcagcatcagaaaagatctgtaatgcccacgggtgcaaaatggccatgagactatgtagcctcaacaggacccagtgtaccttccggaacttcaccagtgctacccaggcattgacagagtggtacatcctgcaggccaccaacatctttgcacaggtgccacagcaggagctagtagagatgagctaccccggcgagcagatgatcctggcctgcctattcggagctgagccctgcaactaccggaacttcacgtccatcttctaccctcactatggcaactgttacatcttcaactggggcatgacagagaaggcacttccttcggccaaccctggaactgaattcggcctgaagttgatcctggacataggccaggaagactacgtccccttccttgcgtccacggccggggtcaggctgatgcttcacgagcagaggtcataccccttcatcagagatgagggcatctacgccatgtcggggacagagacgtccatcggggtactcgtggacaagcttcagcgcatgggggagccctacagcccgtgcaccgtgaatggttctgaggtccccgtccaaaacttctacagtgactacaacacgacctactccatccaggcctgtcttcgctcctgcttccaagaccacatgatccgtaactgcaactgtggccactacctgtacccactgccccgtggggagaaatactgcaacaaccgggacttcccagactgggcccattgctactcagatctacagatgagcgtggcgcagagagagacctgcattggcatgtgcaaggagtcctgcaatgacacccagtacaagatgaccatctccatggctgactggccttctgaggcctccgaggactggattttccacgtcttgtctcaggagcgggaccaaagcaccaatatcaccctgagcaggaagggaattgtcaagctcaacatctacttccaagaatttaactatcgcaccattgaagaatcagcagccaataacatcgtctggctgctctcgaatctgggtggccagtttggcttctggatggggggctctgtgctgtgcctcatcgagtttggggagatcatcatcgactttgtgtggatcaccatcatcaagctggtggccttggccaagagcctacggcagcggcgagcccaagccagctacgctggcccaccgcccaccgtggccgagctggtggaggcccacaccaactttggcttccagcctgacacggccccccgcagccccaacactgggccctaccccagtgagcaggccctgcccatcccaggcaccccgccccccaactatgactccctgcgtctgcagccgctggacgtcatcgagtctgacagtgagggtgatgccatctaaccctgcccctgcccaccccgggcggctgaaactcactgagcagccaagactgttgcccgaggcctcactgtatggtgccctctccaaagggtcgggagggtagctctccaggccagagcttgtgtccttcaacagagaggccagcggcaactggtccgttactggccaagggctctgtagaatcacggtgctggtacaggatgcaggaataaattgtatcttcacctggttcctaccctcgtccctacctgtcctgatcctggtcctgaagacccctcggaacaccctctcctggtggcaggccacttccctcccagtgccagtctccatccaccccagagaggaacaggcgggtgggccatgtggttttctccttcctggccttggctggcctctggggcaggggtggtggagagatggaagggcatcaggtgtagggaccctgccaagtggcacctgatttactctagaaaataaaagtagaaaatactga

SEQ ID NO: 195 - DNA, 5231 bp, Homo Sapiens
actcctccccatcctctccctctgtccctctgtccctctgaccctgcactgtcccagcaccatgggacccacctcaggtcccagcctgctgctcctgctactaacccacctccccctggctctggggagtcccatgtactctatcatcacccccaacatcttgcggctggagagcgaggagaccatggtgctggaggcccacgacgcgcaaggggatgttccagtcactgttactgtccacgacttcccaggcaaaaaactagtgctgtccagtgagaagactgtgctgacccctgccaccaaccacatgggcaacgtcaccttcacgatcccagccaacagggagttcaagtcagaaaaggggcgcaacaagttcgtgaccgtgcaggccaccttcgggacccaagtggtggagaaggtggtgctggtcagcctgcagagcgggtacctcttcatccagacagacaagaccatctacacccctggctccacagttctctatcggatcttcaccgtcaaccacaagctgctacccgtgggccggacggtcatggtcaacattgagaacccggaaggcatcccggtcaagcaggactccttgtcttctcagaaccagcttggcgtcttgcccttgtcttgggacattccggaactcgtcaacatgggccagtggaagatccgagcctactatgaaaactcaccacagcaggtcttctccactgagtttgaggtgaaggagtacgtgctgcccagtttcgaggtcatagtggagcctacagagaaattctactacatctataacgagaagggcctggaggtcaccatcaccgccaggttcctctacgggaagaaagtggagggaactgcctttgtcatcttcgggatccaggatggcgaacagaggatttccctgcctgaatccctcaagcgcattccgattgaggatggctcgggggaggttgtgctgagccggaaggtactgctggacggggtgcagaacccccgagcagaagacctggtggggaagtctttgtacgtgtctgccaccgtcatcttgcactcaggcagtgacatggtgcaggcagagcgcagcgggatccccatcgtgacctctccctaccagatccacttcaccaagacacccaagtacttcaaaccaggaatgccctttgacctcatggtgttcgtgacgaaccctgatggctctccagcctaccgagtccccgtggcagtccagggcgaggacactgtgcagtctctaacccagggagatggcgtggccaaactcagcatcaacacacaccccagccagaagcccttgagcatcacggtgcgcacgaagaagcaggagctctcggaggcagagcaggctaccaggaccatgcaggctctgccctacagcaccgtgggcaactccaacaattacctgcatctctcagtgctacgtacagagctcagacccggggagaccctcaacgtcaacttcctcctgcgaatggaccgcgcccacgaggccaagatccgctactacacctacctgatcatgaacaagggcaggctgttgaaggcgggacgccaggtgcgagagcccggccaggacctggtggtgctgcccctgtccatcaccaccgacttcatcccttccttccgcctggtggcgtactacacgctgatcggtgccagcggccagagggaggtggtggccgactccgtgtgggtggacgtcaaggactcctgcgtgggctcgctggtggtaaaaagcggccagtcagaagaccggcagcctgtacctgggcagcagatgaccctgaagatagagggtgaccacggggcccgggtggtactggtggccgtggacaagggcgtgttcgtgctgaataagaagaacaaactgacgcagagtaagatctgggacgtggtggagaaggcagacatcggctgcaccccgggcagtgggaaggattacgccggtgtcttctccgacgcagggctgaccttcacgagcagcagtggccagcagaccgcccagagggcagaacttcagtgcccgcagccagccgcccgccgacgccgttccgtgcagctcacggagaagcgaatggacaaagtcggcaagtaccccaaggagctgcgcaagtgctgcgaggacggcatgcgggagaaccccatgaggttctcgtgccagcgccggacccgtttcatctccctgggcgaggcgtgcaagaaggtcttcctggactgctgcaactacatcacagagctgcggcggcagcacgcgcgggccagccacctgggcctggccaggagtaacctggatgaggacatcattgcagaagagaacatcgtttcccgaagtgagttcccagagagctggctgtggaacgttgaggacttgaaagagccaccgaaaaatggaatctctacgaagctcatgaatatatttttgaaagactccatcaccacgtgggagattctggctgtgagcatgtcggacaagaaagggatctgtgtggcagaccccttcgaggtcacagtaatgcaggacttcttcatcgacctgcggctaccctactctgttgttcgaaacgagcaggtggaaatccgagccgttctctacaattaccggcagaaccaagagctcaaggtgagggtggaactactccacaatccagccttctgcagcctggccaccaccaagaggcgtcaccagcagaccgtaaccatcccccccaagtcctcgttgtccgttccatatgtcatcgtgccgctaaagaccggcctgcaggaagtggaagtcaaggctgctgtctaccatcatttcatcagtgacggtgtcaggaagtccctgaaggtcgtgccggaaggaatcagaatgaacaaaactgtggctgttcgcaccctggatccagaacgcctgggccgtgaaggagtgcagaaagaggacatcccacctgcagacctcagtgaccaagtcccggacaccgagtctgagaccagaattctcctgcaagggaccccagtggcccagatgacagaggatgccgtcgacgcggaacggctgaagcacctcattgtgaccccctcgggctgcggggaacagaacatgatcggcatgacgcccacggtcatcgctgtgcattacctggatgaaacggagcagtgggagaagttcggcctagagaagcggcagggggccttggagctcatcaagaaggggtacacccagcagctggccttcagacaacccagctctgcctttgcggccttcgtgaaacgggcacccagcacctggctgaccgcctacgtggtcaaggtcttctctctggctgtcaacctcatcgccatcgactcccaagtcctctgcggggctgttaaatggctgatcctggagaagcagaagcccgacggggtcttccaggaggatgcgcccgtgatacaccaagaaatgattggtggattacggaacaacaacgagaaagacatggccctcacggcctttgttctcatctcgctgcaggaggctaaagatatttgcgaggagcaggtcaacagcctgccaggcagcatcactaaagcaggagacttccttgaagccaactacatgaacctacagagatcctacactgtggccattgctggctatgctctggcccagatgggcaggctgaaggggcctcttcttaacaaatttctgaccacagccaaagataagaaccgctgggaggaccctggtaagcagctctacaacgtggaggccacatcctatgccctcttggccctactgcagctaaaagactttgactttgtgcctcccgtcgtgcgttggctcaatgaacagagatactacggtggtggctatggctctacccaggccaccttcatggtgttccaagccttggctcaataccaaaaggacgcccctgaccaccaggaactgaaccttgatgtgtccctccaactgcccagccgcagctccaagatcacccaccgtatccactgggaatctgccagcctcctgcgatcagaagagaccaaggaaaatgagggtttcacagtcacagctgaaggaaaaggccaaggcaccttgtcggtggtgacaatgtaccatgctaaggccaaagatcaactcacctgtaataaattcgacctcaaggtcaccataaaaccagcaccggaaacagaaaagaggcctcaggatgccaagaacactatgatccttgagatctgtaccaggtaccggggagaccaggatgccactatgtctatattggacatatccatgatgactggctttgctccagacacagatgacctgaagcagctggccaatggtgttgacagatacatctccaagtatgagctggacaaagccttctccgataggaacaccctcatcatctacctggacaaggtctcacactctgaggatgactgtctagctttcaaagttcaccaatactttaatgtagagcttatccagcctggagcagtcaaggtctacgcctattacaacctggaggaaagctgtacccggttctaccatccggaaaaggaggatggaaagctgaacaagctctgccgtgatgaactgtgccgctgtgctgaggagaattgcttcatacaaaagtcggatgacaaggtcaccctggaagaacggctggacaaggcctgtgagccaggagtggactatgtgtacaagacccgactggtcaaggttcagctgtccaatgactttgacgagtacatcatggccattgagcagaccatcaagtcaggctcggatgaggtgcaggttggacagcagcgcacgttcatcagccccatcaagtgcagagaagccctgaagctggaggagaagaaacactacctcatgtggggtctctcctccgatttctggggagagaagcccaacctcagctacatcatcgggaaggacacttgggtggagcactggcccgaggaggacgaatgccaagacgaagagaaccagaaacaatgccaggacctcggcgccttcaccgagagcatggttgtctttgggtgccccaactgaccacacccccattcccccactccagataaagcttcagttatatctcacgtgtctggagttctttgccaagagggagaggctgaaatccccagccgcctcacctgcagctcagctccatcctacttgaaacctcacctgttcccaccgcattttctcctggcgttcgcctgctagtgtg

SEQ ID NO: 196 - DNA, 6877 bp, Homo Sapiens
ggcacggaaaaggccaggcgacaggtgtcgcttgaaaagactgggcttgtccttgctggtgcatgcgtcgtcggcctctgggcagcaggtttacaaaggaggaaaacgacttcttctagatttttttttcagtttcttctataaatcaaaacatctcaaaatggagacctaaaatccttaaagggacttagtctaatctcgggaggtagttttgtgcatgggtaaacaaattaagtattaactggtgttttactatccaaagaatgctaattttataaacatgatcgagttatataaggtataccataatgagtttgattttgaatttgatttgtggaaataaaggaaaagtgattctagctggggcatattgttaaagcatttttttcagagttggccaggcagtctcctactggcacattctcccattatgtagaatagaaatagtacctgtgtttgggaaagattttaaaatgagtgacagttatttggaacaaagagctaataatcaatccactgcaaattaaagaaacatgcagatgaaagttttgacacattaaaatacttctacagtgacaaagaaaaatcaagaacaaagctttttgatatgtgcaacaaatttagaggaagtaaaaagataaatgtgatgattggtcaagaaattatccagttatttacaaggccactgatattttaaacgtccaaaagtttgtttaaatgggctgttaccgctgagaatgatgaggatgagaatgatggttgaaggttacattttaggaaatgaagaaacttagaaaattaatataaagacagtgatgaatacaaagaagatttttataacaatgtgtaaaatttttggccagggaaaggaatattgaagttagatacaattacttacctttgagggaaataattgttggtaatgagatgtgatgtttctcctgccacctggaaacaaagcattgaagtctgcagttgaaaagcccaacgtctgtgagatccaggaaaccatgcttgcaaaccactggtaaaaaaaaaaaaaaaaaaaaaaaaaagccacagtgacttgcttattggtcattgctagtattatcgactcagaacctctttactaatggctagtaaatcataattgagaaattctgaattttgacaaggtctctgctgttgaaatggtaaatttattattttttttgtcatgataaattctggttcaaggtatgctatccatgaaataatttctgaccaaaactaaattgatgcaatttgattatccatcttagcctacagatggcatctggtaacttttgactgttttaaaaaataaatccactatcagagtagatttgatgttggcttcagaaacatttagaaaaacaaaagttcaaaaatgttttcaggaggtgataagttgaataactctacaatgttagttctttgagggggacaaaaaatttaaaatctttgaaaggtcttattttacagccatatctaaattatcttaagaaaatttttaacaaagggaatgaaatatatatcatgattctgtttttccaaaagtaacctgaatatagcaatgaagttcagttttgttattggtagtttgggcagagtctctttttgcagcacctgttgtctaccataattacagaggacatttccatgttctagccaagtatactattagaataaaaaaacttaacattgagttgcttcaacagcatgaaactgagtccaaaagaccaaatgaacaaacacattaatctctgattatttattttaaatagaatatttaattgtgtaagatctaatagtatcattatacttaagcaatcatattcctgatgatctatgggaaataactattatttaattaatattgaaaccaggttttaagatgtgttagccagtcctgttactagtaaatctctttatttggagagaaattttagattgttttgttctccttattagaaggattgtagaaagaaaaaaatgactaattggagaaaaattggggatatatcatatttcactgaattcaaaatgtcttcagttgtaaatcttaccattattttacgtacctctaagaaataaaagtgcttctaattaaaatatgatgtcattaattatgaaatacttcttgataacagaagttttaaaatagccatcttagaatcagtgaaatatggtaatgtattattttcctcctttgagttaggtcttgtgcttttttttcctggccactaaatttcacaatttccaaaaagcaaaataaacatattctgaatatttttgctgtgaaacacttgacagcagagctttccaccatgaaaagaagcttcatgagtcacacattacatctttgggttgattgaatgccactgaaacattctagtagcctggagaagttgacctacctgtggagatgcctgccattaaatggcatcctgatggcttaatacacatcactcttctgtgaagggttttaattttcaacacagcttactctgtagcatcatgtttacattgtatgtataaagattatacaaaggtgcaattgtgtatttcttccttaaaatgtatcagtataggatttagaatctccatgttgaaactctaaatgcatagaaataaaaataataaaaaatttttcattttggcttttcagcctagtattaaaactgataaaagcaaagccatgcacaaaactacctccctagagaaaggctagtcccttttcttccccattcatttcattatgaacatagtagaaaacagcatattcttatcaaatttgatgaaaagcgccaacacgtttgaactgaaatacgacttgtcatgtgaactgtaccgaatgtctacgtattccacttttcctgctggggttcctgtctcagaaaggagtcttgctcgtgctggtttctattacactggtgtgaatgacaaggtcaaatgcttctgttgtggcctgatgctggataactggaaaagaggagacagtcctactgaaaagcataaaaagttgtatcctagctgcagattcgttcagagtctaaattccgttaacaacttggaagctacctctcagcctacttttccttcttcagtaacaaattccacacactcattacttccgggtacagaaaacagtggatatttccgtggctcttattcaaactctccatcaaatcctgtaaactccagagcaaatcaagatttttctgccttgatgagaagttcctaccactgtgcaatgaataacgaaaatgccagattacttacttttcagacatggccattgacttttctgtcgccaacagatctggcaaaagcaggcttttactacataggacctggagacagagtggcttgctttgcctgtggtggaaaattgagcaattgggaaccgaaggataatgctatgtcagaacacctgagacattttcccaaatgcccatttatagaaaatcagcttcaagacacttcaagatacacagtttctaatctgagcatgcagacacatgcagcccgctttaaaacattctttaactggccctctagtgttctagttaatcctgagcagcttgcaagtgcgggtttttattatgtgggtaacagtgatgatgtcaaatgcttttgctgtgatggtggactcaggtgttgggaatctggagatgatccatgggttcaacatgccaagtggtttccaaggtgtgagtacttgataagaattaaaggacaggagttcatccgtcaagttcaagccagttaccctcatctacttgaacagctgctatccacatcagacagcccaggagatgaaaatgcagagtcatcaattatccattttgaacctggagaagaccattcagaagatgcaatcatgatgaatactcctgtgattaatgctgccgtggaaatgggctttagtagaagcctggtaaaacagacagttcagagaaaaatcctagcaactggagagaattatagactagtcaatgatcttgtgttagacttactcaatgcagaagatgaaataagggaagaggagagagaaagagcaactgaggaaaaagaatcaaatgatttattattaatccggaagaatagaatggcactttttcaacatttgacttgtgtaattccaatcctggatagtctactaactgccggaattattaatgaacaagaacatgatgttattaaacagaagacacagacgtctttacaagcaagagaactgattgatacgattttagtaaaaggaaatattgcagccactgtattcagaaactctctgcaagaagctgaagctgtgttatatgagcatttatttgtgcaacaggacataaaatatattcccacagaagatgtttcagatctaccagtggaagaacaattgcggagactacaagaagaaagaacatgtaaagtgtgtatggacaaagaagtgtccatagtgtttattccttgtggtcatctagtagtatgcaaagattgtgctccttctttaagaaagtgtcctatttgtaggagtacaatcaagggtacagttcgtacatttctttcatgaagaagaaccaaaacatcgtctaaactttagaattaatttattaaatgtattataactttaacttttatcctaatttggtttccttaaaatttttatttatttacaactcaaaaaacattgttttgtgtaacatatttatatatgtatctaaaccatatgaacatatattttttagaaactaagagaatgataggcttttgttcttatgaacgaaaaagaggtagcactacaaacacaatattcaatcaaaatttcagcattattgaaattgtaagtgaagtaaaacttaagatatttgagttaacctttaagaattttaaatattttggcattgtactaataccgggaacatgaagccaggtgtggtggtatgtgcctgtagtcccaggctgaggcaagagaattacttgagcccaggagtttgaatccatcctgggcagcatactgagaccctgcctttaaaaacaaacagaacaaaaacaaaacaccagggacacatttctctgtcttttttgatcagtgtcctatacatcgaaggtgtgcatatatgttgaatgacattttagggacatggtgtttttataaagaattctgtgagaaaaaatttaataaagcaacaaaaattactcttattcttcattgctttatttcaatgacattggatagtttagtcactcccagactctttccataccttcttaaagcctctcaaatattgaactacagtttatactccttcccataagatgcttcttcattgacacttgtagaacacggggtcaacacatcataaaatctattatggaatgcctgagacaagaatcaaacagtccctttagtaagtttgtttattcacttctctattgattcattcaagaagtctcatgccagccccacctattggaagaaggtctgagttttattcttatctctttggtattaattctgaaacttagaaagtacactggttagcaatgcttgggaccaacaggttgttctggtaaataaatctgtttcatattgtcagtgcaacaaaatgtccccctctgcattatgttattggtactcaacacgtccgagtcataactctgtcctttgcttcttatagaggtattaggtcttcaagagcagaagtaagactgtaatagggaatactcaggggaaggcaggcaaaggctagtcatctaaaccagttctagatgtctgtataggggcagatggctctgtaagggcagaagggaaagaccccttcataagggtcacagctgacaatcctataacaaaagacaggttaacaagagaaaaacttaacaaatttatttaatcacagatttacatcaccggggagccttcgtaatgaagatccaaaattacaggggaaactgtgcatttttatgcttaggtttgataatgaatggacagccctgaagaatagtgattggaaaaaaaggatatgatctaatgggaatagacacaggttggggacccagcaaggcctgtctgttcagattattcttggtctctgtgcagcattccttcctcctggatatagggcagggcctgtatgggatggggatattataacctgctatcaagcaaggtaggtcagagaatttatttatggccagctcttacatagttaggtgaggaaagattagagtactatctttaagatgtaagtctggcattgtggaaagatggttccagtttctatgacctaccttggggaagaggaattcaagtttctgtggcttgccttcagggagaatgaggctgagacaggagggcaggataacatcagagaaaaactttgcttctgaggccttcactttgggttttctgagccccaacatctgctagtgttgtaaagagaacaattagggaccaagtgaggggaggaaagaatccatctctgcattctgatgctgggagacttatttccttgaaatgcaattgattttgcctctgctaagaggctctgctggctacccatgtactagccagtgtcctgcatgggtgctaggctgaattatttgtaattgtgcttaggtgatttgtaactcaggtatagggtatttaaatagtaggcaccctttttgcaccatgtgtttttttttttatctagttcttgtatactacagataatatttgaactttgtcatctcactgtaaaacttttgttcatttctcattatggtaataaatagctattataaccaacccatttattcaaatatgttatttccctaagtgttattttgacattttgttttggaaaaaataaatcaccatagataataa

SEQ ID NO: 197 - DNA, 2988 bp, Homo Sapiens
gcactttaagacttcccgagcggcggcggggacgccagtcgagccgggagacgcttacctgccgcttccccgcgccgcccggtgcacctggccgcaagggacctcgttctcagggaagacggcgacattccgcggaggtggaaccgccgcgcgccgtccgggctcggaccttccccggaacgtgggggcgccttagcgactccttccctgttgtgcccccgttcccggcgttcagcccggccccgcaaaggtgggacggctcccggcttcagttacggaagcggcccgtgtccagcgacgagggttcgaaaatgccccgcgcgttcctggtgaagaagccgtgcgtctccacgtgcaagaggaactggagcgagctccccgacgaggagcgcggcgagatctacgtgccagtcagcctgggcttctgcccaccacagccctaccgggagccggaaccctctgtggccgaacccccttcctgcccgctggctttgaacatgagccttcgagactctagctacagcatggcccccgggccctgtgtggtggcccagctgccctctgaagacatgggccacttgacagacccccagagcagagaccatggcttcctgcgcaccaagatgaaggtgacccttggggacagtcccagtggagacctgttcacctgccgtgtctgccagaaggccttcacctaccagcgcatgctgaaccgccacatgaagtgtcacaacgacgtcaagaggcacctctgcacgtactgcgggaagggcttcaatgacaccttcgacctcaagagacacgtccgaactcacactggcgtgcggccctacaagtgcagcctgtgtgacaaggccttcacgcagcgctgctctctggagtctcacctcaagaagatccatggtgtgcagcagaagtacgcgtacaaggagcggcgggccaagctgtacgtgtgtgaggagtgcggctgcacatctgagagccaggagggccacgtcctgcacctgaaggagcaccaccctgacagcccgctgctgcgcaagacctccaagaaggtggccgtggcactacagaacactgtcacttccctgctgcagggcagcccccacctgtgagtggctcgagccctgggggtgctcctggaagccccaagagcatccaggattgcctcccagctgcctggccagcccaccctcctgcaacctctcacccgaacaccagtgatcaggactggagcccccgtgccttggtctcccccctgggcacacgtgctcactcaggcccagcaatgacctctgctcatttttgcatttttgacttatgggccgaggctgttctgagcctgggaagatgtacctatgtcaagagaagggatgaggccaaggctgccttcaattagaagcagccgcccacagagacaggcactgtgtgcctggcagcaggacttcctacccagaggaggttcgagctaggatcccactgcccccgcctctcagcacagggcaggggctgcaggtccccagtggacatcagagtcaaaagcactggcaaagggtacccctgcaaacaactgtggtgggggctggcagcagaccccccacctggcagggcttctaatgctcagggttctggagggctctgtccttccggcaaggagaggcacacatgtgtgcccagccgtgtgtgtgcgtgtgcttgtgtgtgtgcactgctgtgtgtgtgtgcacgcacaggaagcctttccacatatcacctcatttctaagaaataaactacaaggtgccaagaaggttttatttccttttattttttaaagatgacaaatgtacagatgttaatatatttttggtgccaatggcgatgtttttaagagtgggatggagctggcttttctccattcccgtgcgcttctatttatcctggacatttcaaacctcctctgtgccttggctctgggcgggggctgccccaacccacccccgttctttgtacgtgctgagacagccactagaagatcttcctccagcggcgccctggacggctgctcctgcgaacagcccatggcatcttctgctcttccctcccggctctgccctgcacatcctgttgagccaagccccagtgacccggagagctggcctgatgctgagagtgtgtcctcctggggctttagggggcaggaaggtgggacgaatgacgatgcccatccactacctgaagcactaggacactcttgcagggccaggctggaagaccggcccttttcttggttgagtcaaaagccttagcacagtggcaaaaaatgggacagaatgatgaccagcacctcagaaacttccagagggaggagaggatttgatggctaccaaattgtatctgttgccttttttctgactttttcacctgaccaggctggggtttggagtggctgtggggagacccgtcctggctggctggctggctcccttgctcccttgctgcagctgggaaaggggttctgggtgtaaagaggtgtgcgtcttgtgggccaaagggaaaaacaggcaggggtcagagccagcctgccagaggcaaatgcaaaagaggtccccagaacacagccagctgggcagccccttaaagccaaaccccacctgaagcagaaccactttggcctcccctgcccaaaatgggtagtgtctacacgtccccgggctcaggctcaggcccagccctgggctgacctgagaggaaggctccttcctggactgccctctgaaatgtgtatagattgattctaaaatctcttgtttcacttgactttagagtgtctgggacgctgctgtattctgaaagtcacatagcacacagtaatgttatctggaagctctgtttttgtttacatttctgtatccctgggttgactgccaatccgaggccgtcatgaagctctgtgttgtctgttttattttataaccttcctctcaactattaaaattagagatctaa

SEQ ID NO: 198 - DNA, 1536 bp, Homo Sapiens
agagtctcctcagacgccgagatgctggtcatggcgccccgaaccgtcctcctgctgctctcggcggccctggccctgaccgagacctgggccggctcccactccatgaggtatttctacacctccgtgtcccggcccggccgcggggagccccgcttcatctcagtgggctacgtggacgacacccagttcgtgaggttcgacagcgacgccgcgagtccgagagaggagccgcgggcgccgtggatagagcaggaggggccggagtattgggaccggaacacacagatctacaaggcccaggcacagactgaccgagagagcctgcggaacctgcgcggctactacaaccagagcgaggccgggtctcacaccctccagagcatgtacggctgcgacgtggggccggacgggcgcctcctccgcgggcatgaccagtacgcctacgacggcaaggattacatcgccctgaacgaggacctgcgctcctggaccgccgcggacacggcggctcagatcacccagcgcaagtgggaggcggcccgtgaggcggagcagcggagagcctacctggagggcgagtgcgtggagtggctccgcagatacctggagaacgggaaggacaagctggagcgcgctgaccccccaaagacacacgtgacccaccaccccatctctgaccatgaggccaccctgaggtgctgggccctgggtttctaccctgcggagatcacactgacctggcagcgggatggcgaggaccaaactcaggacactgagcttgtggagaccagaccagcaggagatagaaccttccagaagtgggcagctgtggtggtgccttctggagaagagcagagatacacatgccatgtacagcatgaggggctgccgaagcccctcaccctgagatgggagccgtcttcccagtccaccgtccccatcgtgggcattgttgctggcctggctgtcctagcagttgtggtcatcggagctgtggtcgctgctgtgatgtgtaggaggaagagttcaggtggaaaaggagggagctactctcaggctgcgtgcagcgacagtgcccagggctctgatgtgtctctcacagcttgaaaagcctgagacagctgtcttgtgagggactgagatgcaggatttcttcacgcctcccctttgtgacttcaagagcctctggcatctctttctgcaaaggcacctgaatgtgtctgcgtccctgttagcataatgtgaggaggtggagagacagcccacccttgtgtccactgtgacccctgttcccatgctgacctgtgtttcctccccagtcatctttcttgttccagagaggtggggctggatgtctccatctctgtctcaactttacgtgcactgagctgcaacttcttacttccctactgaaaataagaatctgaatataaatttgttttctcaaatatttgctatgagaggttgatggattaattaaataagtcaattcctggaatttgagagagcaaataaagacctgagaaccttcca

SEQ ID NO: 199 - DNA, 2332 bp, Homo Sapiens
agttgcccgcctgccccggagagccaggcgctaaccagccgctctgcgccccgcgccctgcttgcccccattatccagccttgccccggcgccctgacctgacgccctggcctgacgccctgcttcgtcgcctcctttctctcccaggtgctggaccagggactgagcgtcccccggagagggtccggtgtgaccccgacaagaagcagaaatggggaagaaactggatctttccaagctcactgatgaagaggcccagcatgtcttggaagttgttcaacgagattttgacctccgaaggaaagaagaggaacggctagaggcgttgaagggcaagattaagaaggaaagctccaagagggagctgctttccgacactgcccatctgaacgagacccactgcgcccgctgcctgcagccctaccagctgcttgtgaatagcaaaaggcagtgcctggaatgtggcctcttcacctgcaaaagctgtggccgcgtccacccggaggagcagggctggatctgtgacccctgccatctggccagagtcgtgaagatcggctcactggagtggtactatgagcatgtgaaagcccgcttcaagaggttcggaagtgccaaggtcatccggtccctccacgggcggctgcagggtggagctgggcctgaactgatatctgaagagagaagtggagacagcgaccagacagatgaggatggagaacctggctcagaggcccaggcccaggcccagccctttggcagcaaaaaaaagcgcctcctctccgtccacgacttcgacttcgagggagactcagatgactccactcagcctcaaggtcactccctgcacctgtcctcagtccctgaggccagggacagcccacagtccctcacagatgagtcctgctcagagaaggcagcccctcacaaggctgagggcctggaggaggctgatactggggcctctgggtgccactcccatccggaagagcagccgaccagcatctcaccttccagacacggcgccctggctgagctctgcccgcctggaggctcccacaggatggccctggggactgctgctgcactcgggtcgaatgtcatcaggaatgagcagctgcccctgcagtacttggccgatgtggacacctctgatgaggaaagcatccgggctcacgtgatggcctcccaccattccaagcggagaggccgggcgtcttctgagagtcagggtctaggtgctggagtgcgcacggaggccgatgtagaggaggaggccctgaggaggaagctggaggagctgaccagcaacgtcagtgaccaggagacctcgtccgaggaggaggaagccaaggacgaaaaggcagagcccaacagggacaaatcagttgggcctctcccccaggcggacccggaggtgggcacggctgcccatcaaaccaacagacaggaaaaaagcccccaggaccctggggaccccgtccagtacaacaggaccacagatgaggagctgtcagagctggaggacagagtggcagtgacggcctcagaagtccagcaggcagagagcgaggtttcagacattgaatccaggattgcagccctgagggccgcagggctcacggtgaagccctcgggaaagccccggaggaagtcaaacctcccgatatttctccctcgagtggctgggaaacttggcaagagaccagaggacccaaatgcagacccttcaagtgaggccaaggcaatggctgtgccctatcttctgagaagaaagttcagtaattccctgaaaagtcaaggtaaagatgatgattcttttgatcggaaatcagtgtaccgaggctcgctgacacagagaaaccccaacgcgaggaaaggaatggccagccacaccttcgcgaaacctgtggtggcccaccagtcctaacgggacaggacagagagacagagcagccctgcactgttttccctccaccacagccatcctgtccctcattggctctgtgctttccactatacacagtcaccgtcccaatgagaaacaagaaggagcaccctccacatggactcccacctgcaagtggacagcgacattcagtcctgcactgctcacctgggtttactgatgactcctggctgccccaccatcctctctgatctgtgagaaacagctaagctgctgtgacttccctttaggacaatgttgtgtaaatctttgaaggacacaccgaagacctttatactgtgatcttttacccctttcactcttggctttcttatgttgctttcatgaatggaatggaaaaaagatgactcagttaaggcacca

SEQ ID NO: 200 - DNA, 3853 bp, Homo Sapiens
actctgccagagcgaggcggggcagtgaggactccgcgacgcgtccgcaccctgcggccagagcggctttgagctcggctgcgtccgcgctaggcgctttttcccagaagcaatccaggcgcgcccgctggttcttgagcgccaggaaaagcccggagctaacgaccggccgctcggccactgcacggggccccaagccgcagaaggacgacgggagggtaatgaagctgagcccaggtctcctaggaaggagagagtgcgccggagcagcgtgggaaagaagggaagagtgtcgttaagtttacggccaacggtggattatccgggccgctgcgcgtctgggggctgcggaatgcgcgaggagaacaagggcatgcccagtgggggcggcagcgatgagggtctggccagcgccgcggcgcggggactagtggagaaggtgcgacagctcctggaagccggcgcggatcccaacggagtcaaccgtttcgggaggcgcgcgatccaggtcatgatgatgggcagcgcccgcgtggcggagctgctgctgctccacggcgcggagcccaactgcgcagaccctgccactctcacccgaccggtgcatgatgctgcccgggagggcttcctggacacgctggtggtgctgcaccgggccggggcgcggctggacgtgcgcgatgcctggggtcgtctgcccgtggacttggccgaggagcggggccaccgcgacgttgcagggtacctgcgcacagccacgggggactgacgccaggttccccagccgcccacaacgactttattttcttacccaatttcccacccccacccacctaattcgatgaaggctgccaacggggagcggcggaaagcctgtaagcctgcaagcctgtctgagactcacaggaaggaggagccgaccgggaataaccttccatacatttttttctttgtcttatctggccctcgacactcaccatgaagcgaaacacagagaagcggatttccagggatatttaggagtgtgtgacattccaggggtcgtttgcttttcagggttttctgagggaaagtgcatatgaaatccttgactggacctggtggctacgaatcttccgatggatgaatctcccactccagcgctgagtgggagaaggcagtgattagcacttgggtgacggcagtcgatgcgttcactccaatgtctgctgaggagttatggtgaacccacaacttaggccctagcggcagaaaggaaaacctgaagactgaggacaaagtggaggagggccgaggtgggcttcagtaagtccccggcggcgctttagtttgagcgcatggcaagtcacatgcgtaaacgacactctctggaagccctggagaccctcgcccaactccaccagatagcagaggggtaagagaggatgtgcaagcgacgacagatgctaaaatccctggatcacgacgctgcagagcacctttgcacaggatgctggcctttgctcttactacactgaggagagattcccgcgggttccgcaggcagactacacaggatgaggtggtggagtggagtgagagcaattgtaacggttaactgtaacgttttctttcacacacacacacacacacacacacacacatgctaggatgcggaaatccccttatgacttgctactttttgattttgtgatattttgtactttttagttgttcagcaactgtcttatttaatggggagattttaagtaacataactagtggctctcagttaaaatgtgaggaagaactacagctcttaaatgtagcaatggcactgttgcaaactcagtgcaaacgcctagattgctttcttcttaacctatttatttctttgttaaatttttctgattgtttcctttatagagtgtctcagggtgcagaggtcagactaagaaatattccaaatgtcttttagaagatagatgcacttatgcagtaaattatcttgggatagttcccaaaagattgctgaaaaagtagattgagtataaaaacttgaaaatatatgatggctcgtgggatgtcctactatcactgaacaaactaaaggtgcactgctttgggatttaatttccagggttgcttgatcattatatcattggaacaactgatacttcactactttaataaagaattaacagagattgaactccaagaggtgggtaatttggtttaaaaatacatgttcatgggtttaccactaactcctgagaaatgttaaaggttcacaggggttcccttctctcaatgtttgtaataattgctcataagcaataccagcaattcataaaaactgcttacttatgccatagaaaattaaacacaaagtgtatacatgtattatgcttctaaatgctcattctaccagatacacatttaaaagagaaaaaaggaacagaaacaagtcatttgagagtggagacttataagaaggagtacatttgagttgaatacacaaatctttacttctctaccaattcctattcccaaaatgaacatattactggggaaagttagttgagaatcagagcatatgttattggggaaaggatatgtttattgacacataatctgtaccaggtatgcattaaaatatatttgttaatttaatatttaaacctgagagataggtattgtttcccagatgaggacaatgaggcaaagaaatatcaagtaacttgccaaaggttacaagatattcattccatggatgcacaaagaagtgcatctagttccacagctgattatggttgtcttgcttttcttcccattgcaccagcttgtcctccaaaatcatgaatgatacacatgaagataactttttttaaaaaaaagcagaaatacacaatgatctcccttgtaagctcctaaggtggcttttctttctctaacttctagtaaatataaacggtttgtttgaaaactattttaaaatgtcaacaatatggagaataaccccccccaacacacctataaaaacccaaatttttggaacaaagataatggaacctccattttcaaactgaagcacagggacagaaaatatatttctagttatcacttaagcactcaatcattagaggctacaagaataatatttttaaagttacagtattttacaattattagaaaacattctatataaaagaagtcagttgatactttaaaatctcccatttggtttataaaatcccttaatttgacctctatatcttaaattccaagatgtttaaatttgctagttgcattatactgggtcatgaaaaattatcccttgaaatagatatgaaacatgttacttcatttctggtttaaataacttgtggaatctttcctaatgacaacctgatattaagggaaactaaagaaaatgttattgtggatcccacagtactatattacactgttttttttgtttgttttgttagttttttttatttaaagcaaacctcaaacattattgggtatcaattaccacctggttgtattgaaatagtaacttatcaatgccatgtaaaaattaattccattttcgaagccacctggcagacaggtttagctgtttcatcagcagcctaatatatactgttaaatttgttaaggatttcactttgaaggatacatgcaaaacatatagttactattttcatgagtcctgcttctagctccattgtggaatacagaaaattaaatatacctgttaagttcgtatctaaacctaagacattaccaaggtttgtacaaattctactacctgacatttattccaagaagatctggaaagttaaataaatttataaatttaataaca

SEQ ID NO: 201 - DNA, 888 bp, Homo Sapiens
tgtcgggacgtgcggaggctctcactttccgtcatggcgctgaaggttctaggcgcccacgaggtcccctcgaggaacatcttttcagaacaaacaattcctccgtccgctaagtatggcgggcggcacacggtgaccatgatcccaggggatggcatcgggccagagctcatgctgcatgtcaagtccgtcttcaggcacgcatgtgtaccagtggactttgaagaggtgcacgtgagttccaatgctgatgaagaggacattcgcaatgccatcatggccatccgccggaaccgcgtggccctgaagggcaacatcgaaaccaaccataacctgccaccgtcgcacaaatctcgaaacaacatccttcgcaccagcctggacctctatgccaacgtcatccactgtaagagccttccaggcgtggtgacccggcacaaggacatagacatcctcattgtccgggagaacacagagggcgagtacagcagcctggagcatgagagtgtggcgggagtggtggagagcctgaagatcatcaccaaggccaagtccctgcgcattgccgagtatgccttcaagctggcgcaggagagcgggcgcaagaaagtgacggccgtgcacaaggccaacatcatgaaactgggcgatgggcttttcctccagtgctgcagggaggtggcagcccgctaccctcagatcaccttcgagaacatgattgtggataacaccaccatgcagctggtgtcccggccccagcagtttgatgtcatggtgatgcccaatctctatggcaacatcgtcaacaatgtctgcgcgggactggtcgggggcccaggccttgtggctggggccaactatggccatgtgtacgcggtgtttgaaaca

SEQ ID NO: 202 - DNA, 629 bp, Homo Sapiens
gccacgatgatgttctcgggcttcaacgcagactacgaggcgtcatcctcccgctgcagcagcgcgtccccggccggggatagcctctcttactaccactcacccgcagactccttctccagcatgggctcgcctgtcaacgcgcaggacttctgcacggacctggccgtctccagtgccaacttcattcccacggtcactgccatctcgaccagtccggacctgcagtggctggtgcagcccgccctcgtctcctccgtggccccatcgcagaccagagcccctcaccctttcggagtccccgccccctccgctggggcttactccagggctggcgttgtgaagaccatgacaggaggccgagcgcagagcattggcaggaggggcaaggtggaacagttatctccagaagaagaagagaaaaggagaatccgaagggaaaggaataagatggctgcagccaaatgccgcaaccggaggagggagctgactgatacactccaagcggtaggtactctgtgggttgctcctttttaaaacttaaggggaaagttggagattgagcataagggcccttgagtaagactgtgtcttatgctttcctttatccctctgtatacaggagacag

SEQ ID NO: 203 - DNA, 974 bp, Homo Sapiens
agctttggggttgtccctggacttgtcttggttccagaacctgacgacccggcgacggcgacgtctcttttgactaaaagacagtgtccagtgctccagcctaggagtctacggggaccgcctcccgcgccgccaccatgcccaacttctctggcaactggaaaatcatccgatcggaaaacttcgaggaattgctcaaagtgctgggggtgaatgtgatgctgaggaagattgctgtggctgcagcgtccaagccagcagtggagatcaaacaggagggagacactttctacatcaaaacctccaccaccgtgcgcaccacagagattaacttcaaggttggggaggagtttgaggagcagactgtggatgggaggccctgtaagagcctggtgaaatgggagagtgagaataaaatggtctgtgagcagaagctcctgaagggagagggccccaagacctcgtggaccagagaactgaccaacgatggggaactgatcctgaccatgacggcggatgacgttgtgtgcaccagggtctacgtccgagagtgagtggccacaggtagaaccgcggccgaagcccaccactggccatgctcaccgccctgcttcactgccccctccgtcccaccccctccttctaggatagcgctccccttaccccagtcacttctgggggtcactgggatgcctcttgcagggtcttgctttctttgacctcttctctcctcccctacaccaacaaagaggaatggctgcaagagcccagatcacccattccgggttcactccccgcctccccaagtcagcagtcctagccccaaaccagcccagagcagggtctctctaaaggggacttgagggcctgagcaggaaagactggccctctagcttctaccctttgtccctgtagcctatacagtttagaatatttatttgttaattttattaaaatgctttaaaaaaataaaa

SEQ ID NO: 204 - DNA, 592 bp, Homo Sapiens
actcacggctctgagggctccgacggcactgacggccatggcgcgttcgaacctcccgctggcgctgggcctggccctggtcgcattctgcctcctggcgctgccacgcgacgcccgggcccggccgcaggagcgcatggtcggagaactccgggacctgtcgcccgacgacccgcaggtgcagaaggcggcgcaggcggccgtggccagctacaacatgggcagcaacagcatctactacttccgagacacgcacatcatcaaggcgcagagccagctggtggccggcatcaagtacttcctgacgatggagatggggagcacagactgccgcaagaccagggtcactggagaccacgtcgacctcaccacttgccccctggcagcaggggcgcagcaggagaagctgcgctgtgactttgaggtccttgtggttccctggcagaactcctctcagctcctaaagcacaactgtgtgcagatgtgataagtccccgagggcgaaggccattgggtttggggccatggtggagggcacttcaggtccgtgggccgtatctgtcacaataaatggccagtgctgcttcttgca

SEQ ID NO: 205 - DNA, 6221 bp, Homo Sapiens
aataacctggagccggcggcgtaggttggctctttagggcttcaccccgaagctccaccttcgctcccgtctttctggaaacaccgctttgatctcggcggtgcgggacaggtacctcccggctgctgcgggtgccctggatccagtcggctgcaccaggcgagcgagacccttccctggtggaggctcagagttccggcagggtgcatccggcctgtgtgtggcgcgaggcagggaagccggtacccgggtcctggccccagcgctgacgttttctctcccctttcttctctcttcgcggttgcggcgtcgcagacgctagtgtgagcccccatggcagatacgaccccgaacggcccccaaggggcgggcgctgtgcaattcatgatgaccaataaactggacacggcaatgtggctttctcgcttgttcacagtttactgctctgctctgtttgttctgcctcttcttgggttgcatgaagcagcaagcttttaccaacgtgctttgctggcaaatgctcttaccagtgctctgaggctgcatcaaagattaccacacttccagttaagcagagcattcctggcccaggctttgttagaggacagctgccactacctgttgtattcactcatctttgtaaattcctatccagttacaatgagtatcttcccagtcttgttattctctttgcttcatgctgccacatatacgaaaaaggtccttgacgcaaggggctcaaatagtttacctctgctgagatctgtcttggacaaattaagtgctaatcaacaaaatattctgaaattcattgcttgcaatgaaatattcctgatgcctgcgacagtttttatgctttttagtggtcaaggaagtttgctccaaccttttatatactatagatttcttacccttcgatattcgtctcgaagaaacccatattgtcggaccttatttaatgaactgaggattgttgttgaacacataataatgaaacctgcttgcccactgtttgtgagaagactttgtctccagagcattgcctttataagcagattggcaccaacagttccatagtttaacatctagttaagctacaaatatagtataagcattattagcagctggtacttctgctaggggttgtaaattccaggtgttacactgacctcaatccaatttacataatttacataaatgcatctcggtggaaaaataatcattttcttggcatgttaaatcaagcttaaaaagttttgagaaaattttactgcgctgtgttgctaatggttaaagaagtctgtatctagtgataaatataccagtttttttaaaaagatgctgttgtgcctatatcatgaagtacattaatttctcatgtaaaaaaaatagctctaaaatttgtttcaacctaattggtaacctgagtttatatctggcatgaattcattatggtgatacacatatgtgaattcagtacattttgagacagtattctaccattcagtaattttggttaatgattttaacacttctcagtgtatttaatttcaaattgtttttttaattggttttatgctgctttgttaggacagatgtgttttgaatgtaccattataagaagaattctatgtatcttaaactatgatcttctaaaattttatttccgtaagtacttctgtggccttgagtattttttaaaaggctcaactgtaagcctcttagccagttggataaatatttggggtcacctagccattgaaagcagaaagcagtagtgacacagctttcccttcaaagagccattgagaaacatttctcaaacaggaaatccttcttttactaatgtggacatatagattattcgtattatagtttgtagaactacctagttcagaatcttgactgccagttttcttggtttcttaggcttgaattttcatagacaattgcaacagtttagatgccttttgaaaggaatgtaatgaagattcagcatctgactatatgtgtgtctatcctgaaataataatggagagtatactgtagattacatgtttacccatcaaatctgacttaaaaggttaaatggaaggttttataggtaaggtaattgattgggaatggggtagggggaggagttgtgggggaataatgtgcatttcagtctcaacgcatagataaatttaggggaattggatgtattattcaactttgatttgggttgtaaaatgtgttaaatcctgttcattgaactcccatcaactcttataaaattcatgctgatcttcattaccgttgcatgattggaaatgtttaaaacattgtacagttttagtatagagaaatgtaatggtttttgtgaccagtttctgtctgcatgtaatttggatttctcaaatacattcattagtaatttatcagtaacattagttttatttttgttcatctccttatctataaaaaggggatattcttaggataaatacatgaaaaattatacttgatagcttaactataatcagctatttttgtatttttgtaatatttgtccactaagctggagaagcagcctcatacagttgattttgtgtatgtggctagtcttattgtcactatgtaagtaatccaatggttttagaaactaaactttctagagcaataaaatgactataatgttaagtaaacataatgttgatttctaattatgttttaaaaaatgaagtcttgaattatatcaagaaattttggcagctgaagtcatgtttattttgaagctgttagttttttcctataatttaaaaagatcttttagatttatagaagagtcagaaatgtacaagagagtttttttgttgttgtttttgttttttgagacagagtctgtctctgtcgccaaggctggagtgcagtggcgcaatcctggctcactgtagcctctgcctcctgggttcaagtgcttctcctgcctcagcctcccgagtagctgggactacaggtgcacgccaccacgcctgtagtcccagctgtattgtaaaaatacaaaattttagtatttttagtagagacagggtttcaccatgttggccaggatggtctcgatctcctgacctcgtgatctgcctgcctcggcctcccaaagtgccgggattacaggtgtgagccaccgcgccctgccaagaagagttcttttgcataccctttactcaggtcctctcatgttaacgttttacataactgtagaacatttatctaaagtaagatattagcccagaacaatactactaactgaagtataaaacttatttgaatttcaacagtttttttttcatttcttattttccttttgtgtgctctgtttataccatgatccatgatttttttaaaatcatgattgtcttttaaagatctgtgtgtctctgttttgagtttttcctgtttattttgaaaagtactgttggtcaagataattggtcaataatccatgttggttttaacaaaaagcattttaacattaaaaatattacagtataaaataacactctgtgctttaaattgaggttttatgtcattttagcagaattataatatttctgatatactcatgtttgacaagttgaaacagatttgtttcttaaaggaaggtttaatatacaaaaaaaggtaatcttaaacttacgaaaaagtaaattttacaatttgagcattactagatgtttagtttgcatgaactcatagttagaaattctgcaataggaatatctacaaccggctgatttggaatttgaaattatagtgttacatgtatacctatcaaattaaaattaaggaaatacaatagcaatatatagaatgaatgtagtaacagaaattaactctttactgcatcattgaacttattgttagttacaggtttaaaagaagttcatttaacatccagtgtgtctaattcttctggaagtggtgtagtaccattgttcttctggcatttttaaatattaaacctttttggatagatggaagccttatacaaaatctactttattttagcaaggattctctgtccttttgtatagttggtaccttactaatttaaactctaatatcaatctaaagagaaatttattatgcaatttgtatttaggtttttttttttttttttggaatgaagttcagaggtagatcctcctggaagaaagaaagcaagcgaactttttaaagaaaattagacttgaatatttaagaatgtcccttacagagaaaaggccaactataatactaagctaaaagttatgaaaaattaataggttcttttatagagctaagaatgatgaaaccatcaatacttccttcttcctaaaaatccagatcaaaacttcaggttaggtttctaagtttaggacatgaatattatttttttctggaaaagaagatgagtatatgtgtaataagacaagtagaactgagagatttagttttttttttttttaagttttagttcagaataacattaattttgagagattgaggtaaagaaccttaactaatgctaaggagtttattttgattaacataggttattctgaccaccacctcttccttccttaatctccttagaatctgacagtctcaaagctgtcacacaaattagactaattttgacactttgaaatgaaaacttcaaggaagaagtagccacggacagttatgtttataatcagtaggtggcactctttcctcaggtagccccccattttcacatgatgtgtttgaaggttaaatgccaccaaaagtgctgagtcagctataaaactaagtccctgaattccatggcccttttaaatatgtaatcattcaagattgaaaaaaaaaattaagcattttttgtttgtttgcttgtttgtttttgagacggagtttcactcttgttggccaggctggagtgcaatggcgccatctcagctcactgcaacctctgcctcccggattcaagcaattctccttcagccctccaagtagctggggttacaggtgcccgccaccatgcccagctaatttttgtatttttagtagagacaggatttcaccatgttcaccatgttggtcaggctggtcttgaactcctggcctcaagtgatctgcccgcctcgacctcccagagtgctgggattataggtgtgagccactaagcctggctgagacaactagtttcccttaactcattggaattctctaggattaggagaattccacagagcctatatgatattatagctcaacatttagtataccaaaggcatacccgtgtaaatctaggagttatttccagagattgttttaaggagcagtcttatattcagggtagaaagttatgattggatctgctgttaaggagaacaaaggagcttctaaaggtttgggaggtttactggtagtaactattctaggaaatatttatgttttaaggtgatgttcacatgggttctttagaaggaacatagtcaagtgtgatggattaactctatatagtctttctcctcttgtgcgtgtaggaaatctgacctgcagtgtcagttgatgtgacaagagataaagaaagcacagtattttaaaatctaaagcagattcctttcttagaaaacaataggaaaaaattatagatggatgtctttgctgaaatctaacaattagctcatattccatgagaaagagtggcctaagaattatttcatgttacctagccttctgaagctactcacttgatgtgcctagcactttgaaactaaccttttctttctttgttcatgacagtttaattccaaatatttactattttctcttgtaactgttagaacagttccttttgacattaatttttgcctacatatatatttttaagttgagaccaaatcggtgaagtgttgagcaagtaacatttatgatgtgtgtatattggaacaaatgtaaaagggttacaaagattagaaacagagtcataaaaaatggcttgatttataaaggcattacttttggtgctttatataatggcatatattgaactaaaaatttgtatatacagtatgtcagcatttcttagtaacttctcttgaatccatttttaatatctaatattgtacaggttggggagttacattcttcaggccaatactatccagactatataaatttataaaataaattgaaaaattcattcccctgta

SEQ ID NO: 206 - DNA, 3171 bp, Homo Sapiens
attcgccagccgcctcgctcccggaccccacggctgcaaactgatctggcgcgcggggaggaggagagcgcaggcgagcgaacccgcgagagagggagagagcgagcgagcaacagcgagagcgagagcgagagagccgggaggcagagggagtagtgaccgccttccggagccgggattcatgcctgtcctcgggaccagcgaaggggactttacggctgagtatgagccaggctgctaggagccaggtacccccacgcctgcagtccccgcgccgtgcccggaatgcgagctgcacgcagggctctcccaagttcccaccgagccgaataaaaagcgtcctcccgcagctctccgccaaagacggacattgactccaggactccacagaatggagcaagaatgagaggaaaaaggccggcagaaaagcatgaactggaggtttgttgagctcctctacttcctgtttatatggggccgtatctcagtgcagccctcccaccaggaaccagctgggacagaccaacatgtctccaaggaatttgattggctcatttcagacagggggcctttccaccactccaggagctacctatcctttgtggaaagacaccgtcaaggatttacaaccagatataaaatatacagggagtttgcccgttggaaggtgaggaacacagccatcgagaggagagatctggtccgccatccagtgcccctcatgccggagtttcaaaggagcatccgcctgcttggcaggagacctaccactcagcagttcatcgataccatcatcaaaaagtacggcacccacctgctcatctcagccacattgggaggggaggaggctttgaccatgtatatggacaaaagtcgcctcgacaggaagtcagggaatgccactcaaagtgttgaagctctgcaccagctcgcatcatcctactttgttgaccgtgatggtaccatgaggaggcttcatgagatccagatatcaactggagcaatcaaggtcacagagacacgcactgggcctctgggctgtaacagctatgacaatctggactctgtgagttccgtccttctgcaaagcacggagagcaaactgcaccttcaaggtcttcagataatctttcctcagtatctgcaagagaagtttgtccagtcggccttgagctatatcatgtgcaatggggagggggagtacctgtgccagaacagccagtgtcgctgccaatgtgccgaggagtttccgcagtgcaactgccccatcacggacatccagatcatggagtacacgctggccaacatggccaagtcttgggccgaagcttataaggacctggagaattcagatgagtttaaatcatttatgaagcgcctccccagcaaccacttcctgaccatcggaagcatccatcagcactggggcaatgactgggacctgcagaaccgctacaagctcctgcagagtgccacggaggcacagagacaaaagatccaacgcactgcccgcaagcttttcggcctcagtgtacgctgtcgccacaatcccaaccaccagctgcctagagagaggacaattcagcagtggcttgcaagggtccagtcactcctctactgtaatgagaatgggttttggggaaccttcctggagagccagcggagctgcgtgtgccacggcagcaccacgctgtgccagcgccccatcccctgcgtgataggcgggaacaacagctgcgccatgtgcagcctggccaacatctccctctgcggctcctgcaacaagggctacaagctgtatcgaggccgctgtgaaccacagaacgtggactcggagcggagcgagcagttcatcagctttgagactgacctggacttccaggacctggagctgaagtacctgctgcagaagatggactcacgcctctacgtccacaccaccttcatcagcaacgagatccgcctcgacaccttctttgaccctcggtggcgcaagcgcatgtccctcactctcaagagcaacaagaaccgcatggacttcatccacatggtgatcggcatgtccatgcgcatctgccagatgcgcaacagcagcctggaccccatgttctttgtctatgtcaacccctttagcgggagccattcggagggctggaacatgcccttcggggaatttggctacccacgctgggagaagatccgtctccaaaacagccagtgctacaactggactcttttgctgggcaatcggtggaaaacatttttcgagacggtccacatctacctacgtagtcggactcggctacctaccctactgcgaaatgagactggccagggccccgtggacctgtcggatccctccaagaggcagttctacatcaagatctcagacgtgcaggtgtttgggtatagcctgaggttcaacgccgacctcctgcgcagtgcagtgcagcaggtcaaccagtcctacacacagggcggccagttctattcctcttcgtcagtgatgctcctcttgttggatattcgggaccgaattaatcgcctggcccctcctgtggccccggggaaaccccagctggacttgttctcctgtatgctgaaacaccgcctgaaactgaccaacagcgagatcatcagggtgaaccacgccttggacctgtacaacacggagatcctcaaacagtcggaccagatgacagccaaactctgctaacccgggactccttgccatggacttttcctgttgttgtacacacacaacagaacaaaatgaagcaaaacaaaacaaaaaaacccacaaaaatttgtaaaatgtaattaatattcaaagaaaaggaggaaaatcttcatttgttggaaatgaaaacgttctagcaactgtataaaagcgttgggcatgtttgttatttctatactcactctgtcatgaagaagggtctcagccttttgtggagcattgagggagttgcttcttaggcctcaggtgctgtattgggggagaagggagaaagcatatgcaatgaattgtaaagatctctgctgtgcaggtgctaagattaaacactaaaaagaaagagagatatatgtaatgtacaactgacactgccatttttcctttttggaggaaatggacatagataaagaagatatttcttcggttaagattta

SEQ ID NO: 207 - DNA, 1872 bp, Homo Sapiens
agaagccgagctgagcggatcctcacacgactgtgatccgattctttccagcggcttctgcaaccaagcgggtcttacccccggtcctccgcgtctccagtcctcgcacctggaaccccaacgtccccgagagtccccgaatccccgctcccaggctacctaagaggatgagcggtgctccgacggccggggcagccctgatgctctgcgccgccaccgccgtgctactgagcgctcagggcggacccgtgcagtccaagtcgccgcgctttgcgtcctgggacgagatgaatgtcctggcgcacggactcctgcagctcggccaggggctgcgcgaacacgcggagcgcacccgcagtcagctgagcgcgctggagcggcgcctgagcgcgtgcgggtccgcctgtcagggaaccgaggggtccaccgacctcccgttagcccctgagagccgggtggaccctgaggtccttcacagcctgcagacacaactcaaggctcagaacagcaggatccagcaactcttccacaaggtggcccagcagcagcggcacctggagaagcagcacctgcgaattcagcatctgcaaagccagtttggcctcctggaccacaagcacctagaccatgaggtggccaagcctgcccgaagaaagaggctgcccgagatggcccagccagttgacccggctcacaatgtcagccgcctgcaccggctgcccagggattgccaggagctgttccaggttggggagaggcagagtggactatttgaaatccagcctcaggggtctccgccatttttggtgaactgcaagatgacctcagatggaggctggacagtaattcagaggcgccacgatggctcagtggacttcaaccggccctgggaagcctacaaggcggggtttggggatccccacggcgagttctggctgggtctggagaaggtgcatagcatcacgggggaccgcaacagccgcctggccgtgcagctgcgggactgggatggcaacgccgagttgctgcagttctccgtgcacctgggtggcgaggacacggcctatagcctgcagctcactgcacccgtggccggccagctgggcgccaccaccgtcccacccagcggcctctccgtacccttctccacttgggaccaggatcacgacctccgcagggacaagaactgcgccaagagcctctctggaggctggtggtttggcacctgcagccattccaacctcaacggccagtacttccgctccatcccacagcagcggcagaagcttaagaagggaatcttctggaagacctggcggggccgctactacccgctgcaggccaccaccatgttgatccagcccatggcagcagaggcagcctcctagcgtcctggctgggcctggtcccaggcccacgaaagacggtgactcttggctctgcccgaggatgtggccgttccctgcctgggcaggggctccaaggaggggccatctggaaacttgtggacagagaagaagaccacgactggagaagccccctttctgagtgcaggggggctgcatgcgttgcctcctgagatcgaggctgcaggatatgctcagactctagaggcgtggaccaaggggcatggagcttcactccttgctggccagggagttggggactcagagggaccacttggggccagccagactggcctcaatggcggactcagtcacattgactgacggggaccagggcttgtgtgggtcgagagcgccctcatggtgctggtgctgttgtgtgtaggtcccctggggacacaagcaggcgccaatggtatctgggcggagctcacagagttcttggaataaaagcaacctcagaaca

SEQ ID NO: 208 - DNA, 1990 bp, Homo Sapiens
gaagcagaagagtgagcagatgaaattcagcactgggatcaggggagtgtctgatttgcaaaaggaaagtgcaaagacagctcctcccttctgaggaaacgaaaccaacagcagtccaagctcagtcagcagaagagataaaagcaaacaggtctgggaggcagttctgttgccactctctctcctgtcaatgatggatctcagaaataccccagccaaatctctggacaagttcattgaagactatctcttgccagacacgtgtttccgcatgcaaatcaaccatgccattgacatcatctgtgggttcctgaaggaaaggtgcttccgaggtagctcctaccctgtgtgtgtgtccaaggtggtaaagggtggctcctcaggcaagggcaccaccctcagaggccgatctgacgctgacctggttgtcttcctcagtcctctcaccacttttcaggatcagttaaatcgccggggagagttcatccaggaaattaggagacagctggaagcctgtcaaagagagagagcattttccgtgaagtttgaggtccaggctccacgctggggcaacccccgtgcgctcagcttcgtactgagttcgctccagctcggggagggggtggagttcgatgtgctgcctgcctttgatgccctgggtcagttgactggcggctataaacctaacccccaaatctatgtcaagctcatcgaggagtgcaccgacctgcagaaagagggcgagttctccacctgcttcacagaactacagagagacttcctgaagcagcgccccaccaagctcaagagcctcatccgcctagtcaagcactggtaccaaaattgtaagaagaagcttgggaagctgccacctcagtatgccctggagctcctgacggtctatgcttgggagcgagggagcatgaaaacacatttcaacacagcccagggatttcggacggtcttggaattagtcataaactaccagcaactctgcatctactggacaaagtattatgactttaaaaaccccattattgaaaagtacctgagaaggcagctcacgaaacccaggcctgtgatcctggacccggcggaccctacaggaaacttgggtggtggagacccaaagggttggaggcagctggcacaagaggctgaggcctggctgaattacccatgctttaagaattgggatgggtccccagtgagctcctggattctgctggtgagacctcctgcttcctccctgccattcatccctgcccctctccatgaagcttgagacatatagctggagaccattctttccaaagaacttacctcttgccaaaggccatttatattcatatagtgacaggctgtgctccatattttacagtcattttggtcacaatcgagggtttctggaattttcacatcccttgtccagaattcattcccctaagagtaataataaataatctctaacaccatttattgactgtctgcttcgggctcaggttctgtcctaagccctttaatatgcactctctcattaaatagtcacaacaatcccatgaggcatttttaaaaattttttattattttagattcagagggcacatgtgccatttgttacacagctatattgtgtaatggtggggtttgggcctctattgatcctgtcgcccaaatagtgaacagagtacccaaaaagaattttttcaacctttgcctttctcccttcctcctccctgttggagtccctagtgtctattgttcccatctttagcagatgttaagtatttgattttctgtttctgggttaattcacttcggataatggcctccagctgcaaccatgatttcattctttcttatggctgcataatactccatggtgtagatataccacactttctttatccagttcacactgatgggcacttaagttgattccatgactttgctattgtgaatcgtactgcgataaacatacgagtgccgg

SEQ ID NO: 209 - DNA, 932 bp, Homo Sapiens
gctcaataccccaagcaatacctgcaactgaggattcttcccggggagaccgcagcccatcggcatggctcaagagtttgtgaactgcaaaatccagcctgggaaggtggttgtgttcatcaagcccacctgcccgtactgcaggagggcccaagagatcctcagtcaattgcccatcaaacaagggcttctggaatttgtcgatatcacagccaccaaccacactaacgagattcaagattatttgcaacagctcacgggagcaagaacggtgcctcgagtctttattggtaaagattgtataggcggatgcagtgatctagtctctttgcaacagagtggggaactgctgacgcggctaaagcagattggagctctgcagtaaccacagatctcataggaaatgttcaacaattctgtgaaaggtcacaggacccaattggagaaatcatatgaaaagcatagttggtcttggtgtcatatggatcagaggcacaagtgcagaggctgtggtcatgcggaacactctgttatttaagatggctatccagataatcctgaacactgtgtatttattttatttagactaccagcaaagattaaagcatgaaatgtaaaacatctgataaaacttacagccccctacaccaagagtgtatctgtgaaagagctcctacactttgaaaacttaagaatcccttatcatgaagtttgcctgttctagaattgtaagattgttaatttccttcaatctctagtgacaacacttaatttcttttctaataaaaaaaacctatagatgattcagtgatttttgtccaattcatttgcatgttctcaagacattaaggaatgttatgcgaaatacactaacttaaaactgtgtttatatttggccctgccattataaataaagacacgtgctgctgtca

SEQ ID NO: 210 - DNA, 2251 bp, Homo Sapiens
gttggctgccgaggctcggccggagcgtggagcccgcgccgctgccccaggaccgcgcccgcgcctttgtccgccgccgcccaccgcccgtcgcccgccgcccatggagcgcgccgcgccgtcgcgccgggtcccgcttccgctgctgctgctcggcggccttgcgctgctggcggccggagtggacgcggatgtcctcctggaggcctgctgtgcggacggacaccggatggccactcatcagaaggactgctcgctgccatatgctacggaatccaaagaatgcaggatggtgcaggagcagtgctgccacagccagctggaggagctgcactgtgccacgggcatcagcctggccaacgagcaggaccgctgtgccacgccccacggtgacaacgccagcctggaggccacatttgtgaagaggtgctgccattgctgtctgctggggagggcggcccaggcccagggccagagctgcgagtacagcctcatggttggctaccagtgtggacaggtcttccaggcatgctgtgtcaagagccaggagaccggagatttggatgtcgggggcctccaagaaacggataagatcattgaggttgaggaggaacaagaggacccatatctgaatgaccgctgccgaggaggcgggccctgcaagcagcagtgccgagacacgggtgacgaggtggtctgctcctgcttcgtgggctaccagctgctgtctgatggtgtctcctgtgaagatgtcaatgaatgcatcacgggcagccacagctgccggcttggagaatcctgcatcaacacagtgggctctttccgctgccagcgggacagcagctgcgggactggctatgagctcacagaggacaatagctgcaaagatattgacgagtgtgagagtggtattcataactgcctccccgattttatctgtcagaatactctgggatccttccgctgccgacccaagctacagtgcaagagtggctttatacaagatgctctaggcaactgtattgatatcaatgagtgtttgagtatcagtgccccgtgccctatcgggcatacatgcatcaacacagagggctcctacacgtgccagaagaacgtgcccaactgtggccgtggctaccatctcaacgaggagggaacgcgctgtgttgatgtggacgagtgcgcgccacctgctgagccctgtgggaagggacatcgctgcgtgaactctcccggcagtttccgctgcgaatgcaagacgggttactattttgacggcatcagcaggatgtgtgtcgatgtcaacgagtgccagcgctaccccgggcgcctgtgtggccacaagtgcgagaacacgctgggctcctacctctgcagctgttccgtgggcttccggctctctgtggatggcaggtcatgtgaagacatcaatgagtgcagcagcagcccctgtagccaggagtgtgccaacgtctacggctcctaccagtgttactgccggcgaggctaccagctcagcgatgtggatggagtcacctgtgaagacatcgacgagtgcgccctgcccaccgggggccacatctgctcctaccgctgcatcaacatccctggaagcttccagtgcagctgcccctcgtctggctacaggctggcccccaatggccgcaactgccaagacattgatgagtgtgtgactggcatccacaactgctccatcaacgagacctgcttcaacatccagggcggcttccgctgcctggccttcgagtgccctgagaactaccgccgctccgcagccacccgctgtgagcgcttgccttgccatgagaatcgggagtgctccaagctgcctctgagaataacctactaccacctctctttccccaccaacatccaagcgcccgcggtggttttccgcatgggcccctccagtgctgtccccggggacagcatgcagctggccatcaccggcggcaatgaggagggctttttcaccacccggaaggtgagcccccacagtggggtggtggccctcaccaagcctgtccccgagcccagggacttgctcctgaccgtcaagatggatctctctcgccacggcaccgtcagctcctttgtggccaagcttttcatctttgtgtctgcagagctctgagcactcgcttcgcgtcgcggggtctccctcctgttgctttcctaaccctgccctccggggcgttaataaagtcttagcaagcgtcccacacagtga

SEQ ID NO: 211 - DNA, 1089 bp, Homo Sapiens
ctttcccctgccggtgtcctgctcgccgtccccgccatgctgtctctagactttttggacgatgtgcggcggatgaacaagcggcagctctattatcaagtcctaaattttggaatgattgtctcatcggcactaatgatctggaaggggttaatggtaataactggaagtgaaagtccgattgtagtggtgctcagtggcagcatggaacctgcatttcatagaggagatcttctctttctaacaaatcgagttgaagatcccatacgagtgggagaaattgttgtttttaggatagaaggaagagagattcctatagttcaccgagtcttgaagattcatgaaaagcaaaatgggcatatcaagtttttgaccaaaggagataataatgcggttgatgaccgaggcctctataaacaaggacaacattggctagagaaaaaagatgttgtggggagagccaggggattttatcaggagaacagttcagtggaggacaggaattatttgttccttatattggaattgtgacgatcctcatgaatgactatcctaaatttaagtatgcagttctctttttgctgggtttattcgtgctggttcatcgtgagtaagaagcctgccttgctgttcctgggaagatgccatagttttcgttactggatgtttggagtagatactggtctgtgattggtggaatggagaacacacgtgttggtgcttctgggtagcactggtttgcattagtttatgtttccatgccagagtttgtgtgggcgggcgcatgtgcaccacagagtgcactcgaggggactttcagtcacaggatttcataattgtcattgtcacactttcaaatttttgtacatcagtgaatttttttatattaaaaggttgagccaaagcccccagtgtttgtattttgaagccaagcttcacttctaaagtgcctacagagacttgtaaatgaaaatgcagctctgcacgagtttgaaaccgtcatacctccttctattaggaatggcatatactgaggtggtcgtaagtcttaacttctaaaattttaaataaaagactttgcacattgaa

SEQ ID NO: 212 - DNA, 2716 bp, Homo Sapiens
tcgctttcctgcgcagagtctgcggaggggctcggctgcaccggggggatcgcgcctggcagaccccagaccgagcagaggcgacccagcgcgctcgggagaggctgcaccgccgcgcccccgcctagcccttccggatcctgcgcgcagaaaagtttcatttgctgtatgccatcctcgagagctgtctaggttaacgttcgcactctgtgtatataacctcgacagtcttggcacctaacgtgctgtgcgtagctgctcctttggttgaatccccaggcccttgttggggcacaaggtggcaggatgtctcagtggtacgaacttcagcagcttgactcaaaattcctggagcaggttcaccagctttatgatgacagttttcccatggaaatcagacagtacctggcacagtggttagaaaagcaagactgggagcacgctgccaatgatgtttcatttgccaccatccgttttcatgacctcctgtcacagctggatgatcaatatagtcgcttttctttggagaataacttcttgctacagcataacataaggaaaagcaagcgtaatcttcaggataattttcaggaagacccaatccagatgtctatgatcatttacagctgtctgaaggaagaaaggaaaattctggaaaacgcccagagatttaatcaggctcagtcggggaatattcagagcacagtgatgttagacaaacagaaagagcttgacagtaaagtcagaaatgtgaaggacaaggttatgtgtatagagcatgaaatcaagagcctggaagatttacaagatgaatatgacttcaaatgcaaaaccttgcagaacagagaacacgagaccaatggtgtggcaaagagtgatcagaaacaagaacagctgttactcaagaagatgtatttaatgcttgacaataagagaaaggaagtagttcacaaaataatagagttgctgaatgtcactgaacttacccagaatgccctgattaatgatgaactagtggagtggaagcggagacagcagagcgcctgtattggggggccgcccaatgcttgcttggatcagctgcagaactggttcactatagttgcggagagtctgcagcaagttcggcagcagcttaaaaagttggaggaattggaacagaaatacacctacgaacatgaccctatcacaaaaaacaaacaagtgttatgggaccgcaccttcagtcttttccagcagctcattcagagctcgtttgtggtggaaagacagccctgcatgccaacgcaccctcagaggccgctggtcttgaagacaggggtccagttcactgtgaagttgagactgttggtgaaattgcaagagctgaattataatttgaaagtcaaagtcttatttgataaagatgtgaatgagagaaatacagtaaaaggatttaggaagttcaacattttgggcacgcacacaaaagtgatgaacatggaggagtccaccaatggcagtctggcggctgaatttcggcacctgcaattgaaagaacagaaaaatgctggcaccagaacgaatgagggtcctctcatcgttactgaagagcttcactcccttagttttgaaacccaattgtgccagcctggtttggtaattgacctcgagacgacctctctgcccgttgtggtgatctccaacgtcagccagctcccgagcggttgggcctccatcctttggtacaacatgctggtggcggaacccaggaatctgtccttcttcctgactccaccatgtgcacgatgggctcagctttcagaagtgctgagttggcagttttcttctgtcaccaaaagaggtctcaatgtggaccagctgaacatgttgggagagaagcttcttggtcctaacgccagccccgatggtctcattccgtggacgaggttttgtaaggaaaatataaatgataaaaattttcccttctggctttggattgaaagcatcctagaactcattaaaaaacacctgctccctctctggaatgatgggtgcatcatgggcttcatcagcaaggagcgagagcgtgccctgttgaaggaccagcagccggggaccttcctgctgcggttcagtgagagctcccgggaaggggccatcacattcacatgggtggagcggtcccagaacggaggcgaacctgacttccatgcggttgaaccctacacgaagaaagaactttctgctgttactttccctgacatcattcgcaattacaaagtcatggctgctgagaatattcctgagaatcccctgaagtatctgtatccaaatattgacaaagaccatgcctttggaaagtattactccaggccaaaggaagcaccagagccaatggaacttgatggccctaaaggaactggatatatcaagactgagttgatttctgtgtctgaagtgtaagtgaacacagaagagtgacatgtttacaaacctcaagccagccttgctcctggctggggcctgttgaagatgcttgtattttacttttccattgtaattgctatcgccatcacagctgaacttgttgagatccccgtgttactgcctatcagcattttactactttaaaaaaaaaaaaaaagccaaaaaccaaatttgtatttaaggtatataaattttcccaaaactgataccctttgaaaaagtataaataaaatgagcaaaagttgat

SEQ ID NO: 213 - DNA, 1550 bp, Homo Sapiens
tccttcttaaaaaaaaccagggctccagagaatcagaacagccaccatcaccgcagggagtcaagggaggagggagattagagaaggagccagggagggtggcagggaggccacgtgatccgagtcccctcacccctttccttcccacaggtccctggccaaagatttatttctcttgacaaccaagggcctccgtctggatttccaaggaagaatttcctctgaagcaccggaacttgctactaccagcaccatgccctaccaatatccagcactgaccccggagcagaagaaggagctgtctgacatcgctcaccgcatcgtggcacctggcaagggcatcctggctgcagatgagtccactgggagcattgccaagcggctgcagtccattggcaccgagaacaccgaggagaaccggcgcttctaccgccagctgctgctgacagctgacgaccgcgtgaacccctgcattgggggtgtcatcctcttccatgagacactctaccagaaggcggatgatgggcgtcccttcccccaagttatcaaatccaagggcggtgttgtgggcatcaaggtagacaagggcgtggtccccctggcagggacaaatggcgagactaccacccaagggttggatgggctgtctgagcgctgtgcccagtacaagaaggacggagctgacttcgccaagtggcgttgtgtgctgaagattggggaacacaccccctcagccctcgccatcatggaaaatgccaatgttctggcccgttatgccagtatctgccagcagaatggcattgtgcccatcgtggagcctgagatcctccctgatggggaccatgacttgaagcgctgccagtatgtgaccgagaaggtgctggctgctgtctacaaggctctgagtgaccaccacatctacctggaaggcaccttgctgaagcccaacatggtcaccccaggccatgcttgcactcagaagttttctcatgaggagattgccatggcgaccgtcacagcgctgcgccgcacagtgccccccgctgtcactgggatcaccttcctgtctggaggccagagtgaggaggaggcgtccatcaacctcaatgccattaacaagtgccccctgctgaagccctgggccctgaccttctcctacggccgagccctgcaggcctctgccctgaaggcctggggcgggaagaaggagaacctgaaggctgcgcaggaggagtatgtcaagcgagccctggccaacagccttgcctgtcaaggaaagtacactccgagcggtcaggctggggctgctgccagcgagtccctcttcgtctctaaccacgcctattaagcggaggtgttcccaggctgcccccaacactccaggccctgccccctcccactcttgaagaggaggccgcctcctcggggctccaggctggcttgcccgcgctctttcttccctcgtgacagtggtgtgtggtgtcgtctgtgaatgctaagtccatcaccctttccggcacactgccaaataaacagctatttaaggggga

SEQ ID NO: 214 - DNA, 5705 bp, Homo Sapiens
agagaagagtgtccagctcctccagaggctgcccgcccgccgctccttccctgcccacctactatgaggagcagctcctcccacctgcccataaaagccaagtgcatgttaccagcagcggatcacagcccttccccgatcctctccgtgggagccagcgagcctctctccctgatcttacgtgctcaagggagctcacacgttcaccaactcacccttgaagtcatctcaagaacaaaagacaactgaaagaagctgttgtgaaggcagagcagcatctgctgaagagacagaaaccagccccagaggtgtcacaggaaggcaccagcaaggacattggtctttgatttgattcagcagtcctgtcaagtataaatgtgatggctgtgctgcctggccctctgcagctgctgggagtgctgcttaccatttccctgagttccatcaggctcattcaggctggtgcctactatgggatcaagccgctgccacctcaaattcctcctcagatgccaccacaaattccacaataccagcccctgggtcagcaagtacctcacatgcctttggccaaagatggccttgccatgggcaaggagatgccccacttgcagtatggcaaagagtatccacacctaccccaatatatgaaggaaattcaaccggcgccaagaatgggcaaggaagccgtacccaagaaaggcaaagaaataccattagccagtttacgaggggaacaaggtccccgtggagagcctggcccaagaggaccacctgggccccctggtttgccaggtcatgggatacctggaattaaaggaaaaccagggccacagggatatccaggagttggaaagccaggtatgcctggaatgccagggaagccaggagccatgggcatgcctggggcaaaaggagaaattggacagaaaggggaaattgggcctatggggatcccaggaccacaaggacctccagggcctcatggacttcctggcattgggaagccaggtgggccagggttaccagggcaaccaggaccaaagggtgatcgaggacccaaaggactaccaggacctcaaggccttcggggtcctaaaggagacaagggcttcgggatgccaggtgcgccaggtgtaaaggggcctccagggatgcacggccctcccggccctgttggactgccaggagtgggcaaaccaggagtgacaggcttccctgggccccagggccccctgggaaagccaggggctccaggagaacctgggccacaaggccctattggggtaccgggggttcaaggacctcctgggatacccggaattggaaagccaggccaggatgggatcccaggccagccaggatttccaggtggcaaaggggagcaaggactgccagggctaccaggacccccaggccttccagggattgggaaaccaggcttcccaggacccaaaggtgaccggggcatgggaggtgttcctggggctcttggaccaagaggggagaaaggaccaataggtgccccaggaatagggggtcctccaggagagccaggcctgcctggaatcccaggtcctatgggccctccaggtgctattggttttcctggacccaaaggagaaggtgggattgtagggccacaggggccaccaggtcccaagggtgagccagggcttcaaggcttcccaggaaagccaggtttccttggtgaagtagggcctcctggcatgaggggtttgccaggtcccatagggcccaagggggaagctgggcaaaaaggtgtaccaggactccctggtgttccagggcttctcggacctaagggagagccaggaatcccaggggatcagggtttacagggccccccaggtatcccagggattgggggccctagtggccccattggaccacctgggattccaggccccaaaggggagccgggcctcccagggccccctgggttccctggtatagggaaacccggagtggcaggacttcatggccccccagggaagcctggtgcccttggtcctcaaggccagcctggccttccaggacccccaggccctccaggacctccaggacccccagctgtgatgccccctacaccaccaccccagggagagtatctgccagatatggggctgggaattgatggcgtgaaacccccccatgcctacggggctaagaaaggcaagaatggagggccagcctatgagatgcctgcatttaccgccgagctaaccgcacctttcccaccggtgggggccccagtgaagtttaacaaactgctgtataacggcagacagaactacaacccgcagacaggcatcttcacctgtgaggtccctggtgtctactactttgcataccacgttcactgcaaggggggcaacgtgtgggttgctctattcaagaacaacgagcccgtgatgtacacgtacgacgagtacaaaaagggcttcctggaccaggcatctgggagtgcagtgctgctgctcaggcccggagaccgggtgttcctccagatgccctcagaacaggctgcaggactgtatgccgggcagtatgtccactcctccttttcaggatatttattgtatcccatgtaaaaacaaaaaaacaaaaaacaaagaaaagaaagagattttatagaagaaaatgacacaccaaaaaatccaaatgaaaaacataattgcttcaaaacacttacacagttggaaagttatatgtaagtgaaaatttggaccattgtgtacaaataaaaactaagatgcatgtttaatactccacacagcagcctgtaattgcgaatgatgggatagagttatgtatcaagtactgacacttggttgtacccactggaatcatattagctgttttatgttatatgcttccacagtaacctgcttattcagatcagtcaaaatatatcagtatgaaagatcatagctaatgaaaggcactcactcatattgtttactttaaaatatttataaatatgccttaaagaaatacaaatgataacaattacataccgtatttacttgcttaatttcctctgtatttgtgtagatactttgacatggaatatatggtggggagacccgtagtgttaccgccccagtgggagggggccctggggaccctggtaatgctttagtcaaagggatatctctcttgtatcagaggctgtgtcttttagtaacaggagtcctcgtcagaattgcgtgtctgttgtctctaaaagaatgggtgaaccaatcggcctttgtgaatttattcagtgccttctctgtaccaagcactgggtaaggcacttttgtggagcattagacagtaaccctcaaggagctagagaaccggatgggagacatgagcagtaattaactcacttgttccccagagtttctatttgttttgattttctttttctgtgacttattttcctattttctttcctccatgtaattttcactatggcccaactaatataaacacctggaaattacaaggaaaaaaaattcttcctctaataactttccaaatttgtggaatatttatttgtaatagcagttatcagttatgcttatatagcattaaaaattctcctcctttgactacacacacaaccacagtgtggttctaatcatggagatatcagtaatttttagtaactgaattttgaggacatttctctgtttagcatgtatgcaaactgatatgtaatctgaggttccaaagtcaatttttttcttttttttttgagatggagtcttactctgtcacccaggctggagtgcagtagcacgatcttggcttactgcaacctctacctcctaggttcaagcaattgtcctgtctcagcctcccgagtactgggactactgtcttgcgccaccatgcctggctaatttttgtatatttagtaaagatgggttttcgccatgttggccaggctggtctcaaactcctggcctcaagtgatgcacctgcctcagccttccaaagtgctgggattacaggcatgagccaccgtgcccggccaaagtcagctttcaaaatccaagccataattggtgaggggggagtttcagaattacatagaaaaattaatatttgaaaaaataattctgaaatttcgaatttaaaaacagatgtgctgcttctgggtgtaggtagtaaaagtataggaaaagaactgtttccttagaagcggactgtggaagggctatgtagaatgtcaaagggcaacaagagcctgtgtttttaatgtcatcctgtactcggcacaaatcaaaggccaatacaagtctgaaaagcagaaataaatatttttccaggtttttgcttgggcacatactaactgctttgggcattctaatctggtctccaaacaccaaagacccatttcgagcctgctattagcctgctgctgactctatcacttggagcaataatgtggggttatggtggtggaatcttgtatatttttgtcaaaaataaaaccatgagttaaggggatagatatagatggaaaaatacacaaataaatacggtatgaaaacacatggaaatgtgtctttgtcaaatctgaatcattattaccatcacaaaaattcttctcttggccaatatctcatttccctatatagtatacaagcaccatttcttctcaatttttaagaagagaaattagtccattaccacaggggttcttgtcactactaattatacaacaatcttttcccaacaaaaagatgtcctccacaacctttgttttcaaagcagacagcatctatgtggccaaatatactttgggttgttcttgaggatactggttttgggctgatgactatggtgggcagcatggatccattgggctccttctgctaaacagccacattgaaatggtttaaaagcaagtcagatcaggtgatttgtaaaattgtatttatctgtacatgtatgggcttttaattcccaccaagaaagagagaaattatctttttagttaaaaccaaatttcacttttcaaaatatcttccaacttatttattggttgtcactcaattgcctatatatatatatatatgtgtgtgtgtgtgtgtgtgcgcgtgagcgcacgtgtgtgtatgcgtgcgcatgtgtgtgtatgtgtattatcagacataggtttctaacttttagatagaagaggagcaacatctatgccaaatactgtgcattctacaatggtgctaatctcagacctaaatgatactccatttaatttaaaaaagagttttaaataattatctatgtgcctgtatttcccttttgagtgctgcacaacatgttaacatattagtgtaaaagcagatgaaacaaccacgtgttctaaagtctagggattgtgctataatccctatttagttcaaaattaaccagaattcttccatgtgaaatggaccaaactcatattattgttatgtaaatacagagttttaatgcagtatgacatcccacaggggaaaagaatgtctgtagtgggtgactgttatcaaatattttatagaatacaatgaacggtgaacagactggtaacttgtttgagttcccatgacagatttgagacttgtcaatagcaaatcatttttgtatttaaatttttgtactgatttgaaaaacatcattaaatatctttaaaagtatgtttctca

SEQ ID NO: 215 - DNA, 2098 bp, Homo Sapiens
ccgcgacgcgtccgcaccctgcggccagagcggctttgagctcggctgcgtccgcgctaggcgctttttcccagaagcaatccaggcgcgcccgctggttcttgagcgccaggaaaagcccggagctaacgaccggccgctcggccactgcacggggccccaagccgcagaaggacgacgggagggtaatgaagctgagcccaggtctcctaggaaggagagagtgcgccggagcagcgtgggaaagaagggaagagtgtcgttaagtttacggccaacggtggattatccgggccgctgcgcgtctgggggctgcggaatgcgcgaggagaacaagggcatgcccagtgggggcggcagcgatgagggtctggccagcgccgcggcgcggggactagtggagaaggtgcgacagctcctggaagccggcgcggatcccaacggagtcaaccgtttcgggaggcgcgcgatccaggtagctggggccccagggcctcgccggcagggggcgcgcgaacgcggggcgcggcctcggcggatcggggctggaacctagatcgccgatgtagatttgtacaggagtctccgttggccggaggtcatgatgatgggcagcgcccgcgtggcggagctgctgctgctccacggcgcggagcccaactgcgcagaccctgccactctcacccgaccggtgcatgatgctgcccgggagggcttcctggacacgctggtggtgctgcaccgggccggggcgcggctggacgtgcgcgatgcctggggtcgtctgcccgtggacttggccgaggagcggggccaccgcgacgttgcagggtacctgcgcacagccacgggggactgacgccaggttccccagccgcccacaacgactttattttcttacccaatttcccacccccacccacctaattcgatgaaggctgccaacggggagcggcggaaagcctgtaagcctgcaagcctgtctgagactcacaggaaggaggagccgaccgggaataaccttccatacatttttttctttgtcttatctggccctcgacactcaccatgaagcgaaacacagagaagcggatttccagggatatttaggagtgtgtgacattccaggggtcgtttgcttttcagggttttctgagggaaagtgcatatgaaatccttgactggacctggtggctacgaatcttccgatggatgaatctcccactccagcgctgagtgggagaaggcagtgattagcacttgggtgacggcagtcgatgcgttcactccaatgtctgctgaggagttatggtgaacccacaacttaggccctagcggcagaaaggaaaacctgaagactgaggacaaagtggaggagggccgaggtgggcttcagtaagtccccggcggcgctttagtttgagcgcatggcaagtcacatgcgtaaacgacactctctggaagccctggagaccctcgcccaactccaccagatagcagaggggtaagagaggatgtgcaagcgacgacagatgctaaaatccctggatcacgacgctgcagagcacctttgcacaggatgctggcctttgctcttactacactgaggagagattcccgcgggttccgcaggcagactacacaggatgaggtggtggagtggagtgagagcaattgtaacggttaactgtaacgttttctttcacacacacacacacacacacacacacacatgctaggatgcggaaatccccttatgacttgctactttttgattttgtgatattttgtactttttagttgttcagcaactgtcttatttaatggggagattttaagtaacataactagtggctctcagttaaaatgtgaggaagaactacagctcttaaatgtagcaatggcactgttgcaaactcagtgcaaacgcctagattgctttcttcttaacctatttatttctttgttaaatttttctgattgtttcctttatagagtgtctcagggtgcagaggtcagactaagaaatattccaaatgtcttttagaagatagatgcacttatgcagtaaattatcttgggatagttcccaaaagat

SEQ ID NO: 216 - DNA, 2904 bp, Homo Sapiens
gttggctgccgaggctcggccggagcgtggagcccgcgccgctgccccaggaccgcgcccgcgcctttgtccgccgccgcccaccgcccgtcgcccgccgcccatggagcgcgccgcgccgtcgcgccgggtcccgcttccgctgctgctgctcggcggccttgcgctgctggcggccggagtggacgcggatgtcctcctggaggcctgctgtgcggacggacaccggatggccactcatcagaaggactgctcgctgccatatgctacggaatccaaagaatgcaggatggtgcaggagcagtgctgccacagccagctggaggagctgcactgtgccacgggcatcagcctggccaacgagcaggaccgctgtgccacgccccacggtgacaacgccagcctggaggccacatttgtgaagaggtgctgccattgctgtctgctggggagggcggcccaggcccagggccagagctgcgagtacagcctcatggttggctaccagtgtggacaggtcttccaggcatgctgtgtcaagagccaggagaccggagatttggatgtcgggggcctccaagaaacggataagatcattgaggttgaggaggaacaagaggacccatatctgaatgaccgctgccgaggaggcgggccctgcaagcagcagtgccgagacacgggtgacgaggtggtctgctcctgcttcgtgggctaccagctgctgtctgatggtgtctcctgtgaagatgtcaatgaatgcatcacgggcagccacagctgccggcttggagaatcctgcatcaacacagtgggctctttccgctgccagcgggacagcagctgcgggactggctatgagctcacagaggacaatagctgcaaagatattgacgagtgtgagagtggtattcataactgcctccccgattttatctgtcagaatactctgggatccttccgctgccgacccaagctacagtgcaagagtggctttatacaagatgctctaggcaactgtattgatatcaatgagtgtttgagtatcagtgccccgtgccctatcgggcatacatgcatcaacacagagggctcctacacgtgccagaagaacgtgcccaactgtggccgtggctaccatctcaacgaggagggaacgcgctgtgttgatgtggacgagtgcgcgccacctgctgagccctgtgggaagggacatcgctgcgtgaactctcccggcagtttccgctgcgaatgcaagacgggttactattttgacggcatcagcaggatgtgtgtcgatgtcaacgagtgccagcgctaccccgggcgcctgtgtggccacaagtgcgagaacacgctgggctcctacctctgcagctgttccgtgggcttccggctctctgtggatggcaggtcatgtgaagacatcaatgagtgcagcagcagcccctgtagccaggagtgtgccaacgtctacggctcctaccagtgttactgccggcgaggctaccagctcagcgatgtggatggagtcacctgtgaagacatcgacgagtgcgccctgcccaccgggggccacatctgctcctaccgctgcatcaacatccctggaagcttccagtgcagctgcccctcgtctggctacaggctggcccccaatggccgcaactgccaagacattgatgagtgtgtgactggcatccacaactgctccatcaacgagacctgcttcaacatccagggcggcttccgctgcctggccttcgagtgccctgagaactaccgccgctccgcagccacgctccagcaggagaagacagacacggtccgctgcatcaagtcctgccgccccaacgatgtcacatgcgtgttcgaccccgtgcacaccatctcccacaccgtcatctcgctgcctaccttccgcgagttcacccgccctgaagagatcatcttcctccgggccatcacgccaccgcatcctgccagccaggctaacatcatcttcgacatcacggaagggaacctgcgggactcttttgacatcatcaagcgttacatggacggcatgaccgtgggtgtcgtgcgccaggtgcggcccatcgtgggcccatttcatgccgtcctgaagctggagatgaactatgtggtcgggggcgtggtctcccaccgaaatgttgtcaacgtccacatcttcgtctctgagtactggttctgagggctggtctgccgcacagccgcaggtgcacctccaggccaaatcattgctgccagtgactgtggtctgtacttgtttataccctcagacttttttaatgttaggtatttgtagcattaggccaacatgtattaagctgagccagatgaataagtccatctgatgtattttcggtgtttaaaaaatgagcccagttgctcaactgtttggttgaaaaccttgctcattttttaatgcgaaggctaagtgtcaccccctttctctgcctctggctgggccttgctaagggccaaggaaagaaagacattttttagggggcagccagtccaaatgccaaaagaagaccagttcttgccctgattgtatgaaatttgacattttggcactttttttttttttttggccaatcagattttctatgttctaaggacatggctgctgtagaatagcacagacgtggatgataaattatccccagaagcagcatgacagaatgcctcggggagcacttggaagggaaattgcagttctgttgaaatagaggaaaatcccttggtaaagacacagcctgttaggctcgtgtgggcctccagtatgttcaccaggggaatggctgggatttctcggcactctgcatcatccatcttttcttataggtgggaaaataaacaactttgtgatcctcctga

SEQ ID NO: 217 - DNA, 733 bp, Homo Sapiens
attcccaactgccagtgatctctgaagccgactctgaggctccctctttgctctaacagacagcagcgactttaggctggataatagtcaaattcttacctcgctctttcactgctagtaagatcagattgcgtttctttcagttactcttcaatcgccagtttcttgatctgcttctaaaagaagaagtagagaagataaatcctgtcttcaatacctggaaggaaaaacaaaataacctcaactccgttttgaaaaaaacattccaagaactttcatcagagattttacttgacaggaaaggccatgtgaggacatagggagaaagcagccaccattggcaagccaagagagagccctcaccaggaacgattggaccagcaccttgatcttggattttctagcctccagaactagatgatttacacaatgaagaaagtacatgcactttgggcttctgtatgcctgctgcttaatcttgcccctgcccctcttaatgctgattctgaggaagatgaagaacacacaattatcacagatacggagttgccaccactgaaacttatgcattcattttgtgcattcaaggcggatgatggcccatgtaaagcaatcatgaaaagatttttcttcaatattttcactcgacagtgcgaagaatttatatatgggggatgtgaaggaaatcagaatcgatttgaaagtctggaagagtgcaaaaaaatgtgtacaa

SEQ ID NO: 218 - DNA, 3679 bp, Homo Sapiens
aggcgtccaacctgctgccgcctgggccccgccgagcggagctagcgccgcgcgcagagcacacgctcgcgctccagctcccctcctgcgcggttcatgactgtgtcccctgaccgcagcctctgcgagcccccgccgcaggaccacggcccgctccccgccgccgcgagggccccgagcgaaggaaggaagggaggcgcgctgtgcgccccgcggagcccgcgaaccccgctcgctgccggctgcccagcctggctggcaccatgctgcccgcgcgctgcgcccgcctgctcacgccccacttgctgctggtgttggtgcagctgtcccctgctcgcggccaccgcaccacaggccccaggtttctaataagtgaccgtgacccacagtgcaacctccactgctccaggactcaacccaaacccatctgtgcctctgatggcaggtcctacgagtccatgtgtgagtaccagcgagccaagtgccgagacccgaccctgggcgtggtgcatcgaggtagatgcaaagatgctggccagagcaagtgtcgcctggagcgggctcaagccctggagcaagccaagaagcctcaggaagctgtgtttgtcccagagtgtggcgaggatggctcctttacccaggtgcagtgccatacttacactgggtactgctggtgtgtcaccccggatgggaagcccatcagtggctcttctgtgcagaataaaactcctgtatgttcaggttcagtcaccgacaagcccttgagccagggtaactcaggaaggaaagatgacgggtctaagccgacacccacgatggagacccagccggtgttcgatggagatgaaatcacagccccaactctatggattaaacacttggtgatcaaggactccaaactgaacaacaccaacataagaaattcagagaaagtctattcgtgtgaccaggagaggcagagtgccctggaagaggcccagcagaatccccgtgagggtattgtcatccctgaatgtgcccctgggggactctataagccagtgcaatgccaccagtccactggctactgctggtgtgtgctggtggacacagggcgcccgctgcctgggacctccacacgctacgtgatgcccagttgtgagagcgacgccagggccaagactacagaggcggatgaccccttcaaggacagggagctaccaggctgtccagaagggaagaaaatggagtttatcaccagcctactggatgctctcaccactgacatggttcaggccattaactcagcagcgcccactggaggtgggaggttctcagagccagaccccagccacaccctggaggagcgggtagtgcactggtatttcagccagctggacagcaatagcagcaacgacattaacaagcgggagatgaagcccttcaagcgctacgtgaagaagaaagccaagcccaagaaatgtgcccggcgtttcaccgactactgtgacctgaacaaagacaaggtcatttcactgcctgagctgaagggctgcctgggtgttagcaaagaagtaggacgcctcgtctaaggagcagaaaacccaagggcaggtggagagtccagggaggcaggatggatcaccagacacctaaccttcagcgttgcccatggccctgccacatcccgtgtaacataagtggtgcccaccatgtttgcacttttaataactcttacttgcgtgttttgtttttggtttcattttaaaacaccaatatctaataccacagtgggaaaaggaaagggaagaaagactttattctctctcttattgtaagtttttggatctgctactgacaacttttagagggttttgggggggtgggggagggtgttgttggggctgagaagaaagagatttatatgctgtatataaatatatatgtaaattgtatagttcttttgtacaggcattggcattgctgtttgtttatttctctccctctgcctgctgtgggtggtgggcactctggacacatagtccagctttctaaaatccaggactctatcctgggcctactaaacttctgtttggagactgacccttgtgtataaagacgggagtcctgcaattgtactgcggactccacgagttcttttctggtgggaggactatattgccccatgccattagttgtcaaaattgataagtcacttggctctcggccttgtccagggaggttgggctaaggagagatggaaactgccctgggagaggaagggagtccagatcccatgaatagcccacacaggtaccggctctcagagggtccgtgcattcctgctctccggacccccaaagggcccagcattggtgggtgcaccagtatcttagtgaccctcggagcaaattatccacaaaggatttgcattacgtcactcgaaacgttttcatccatgcttagcatctactctgtataacgcatgagaggggaggcaaagaagaaaaagacacacagaagggcctttaaaaaagtagatatttaatatctaagcaggggaggggacaggacagaaagcctgcactgaggggtgcggtgccaacagggaaactcttcacctccctgcaaacctaccagtgaggctcccagagacgcagctgtctcagtgccaggggcagattgggtgtgacctctccactcctccatctcctgctgttgtcctagtggctatcacaggcctgggtgggtgggttgggggaggtgtcagtcaccttgttggtaacactaaagttgttttgttggttttttaaaaacccaatactgaggttcttcctgttccctcaagttttcttatgggcttccaggctttaagctaattccagaagtaaaactgatcttgggtttcctattctgcctcccctagaagggcaggggtgataacccagctacagggaaatcccggcccagctttccacaggcatcacaggcatcttccgcggattctagggtgggctgcccagccttctggtctgaggcgcagctccctctgcccaggtgctgtgcctattcaagtggccttcaggcagagcagcaagtggcccttagcgccccttcccataagcagctgtggtggcagtgagggaggttgggtagccctggactggtcccctcctcagatcacccttgcaaatctggcctcatcttgtattccaacccgacatccctaaaagtacctccacccgttccgggtctggaaggcgttggcaccacaagcactgtccctgtgggaggagcacaaccttctcgggacaggatctgatggggtcttgggctaaaggaggtccctgctgtcctggagaaagtcctagaggttatctcaggaatgactggtggccctgccccaacgtggaaaggtgggaaggaagccttctcccattagccccaatgagagaactcaacgtgccggagctgagtgggccttgcacgagacactggccccactttcaggcctggaggaagcatgcacacatggagacggcgcctgcctgtagatgtttggatcttcgagatctccccaggcatcttgtctcccacaggatcgtgtgtgtaggtggtgttgtgtggttttcctttgtgaaggagagagggaaactatttgtagcttgttttataaaaaataaaaaatgggtaaatcttg

SEQ ID NO: 219 - DNA, 751 bp, Homo Sapiens
aactcgccgctgccggcctgacctcgctcccagccctgctgcccagattctaggctccaagctcaggacctcaggatgggagatgaggagaagcggaacagggccatcacggcccgcaggcagcacctgaagagtgtgatgctgcagatagcggccacggagctggagaaggaggagagccgccgtgaggcagagaagcagaactacctggcggagcactgcccgccgctgcatatcccgggctccatgtctgaagtgcaggagctctgcaaacagctgcacgccaagatcgatgcggctgaagaggagaagtacgacatggaggtgagggtgcagaagaccagcaaggagctggaggacatgaaccagaagctatttgatctgcggggcaagttcaagcggcccccactgcggagggtgcgcatgtcggccgatgccatgctcaaggccctgctgggctcgaagcacaaggtgtgcatggacctgagggccaacctgaagcaggtcaagaaggaggacacagagaaggagcgggacctgcgagacgtgggtgactggaggaagaacatcgaggagaagtctggcatggagggccggaagaagatgtttgagtccgagtcctaggccactcgctgcccctacgcctgccccggtgcccggctcccagcagaacatactagggagatgcacccagagcctgccagggagggctggcctcaccaccaccgtcaataaaggatttgaatcccca

SEQ ID NO: 220 - DNA, 3228 bp, Homo Sapiens
gggccgtgctgcttatggcggcgctggagagggggcgctgagctgttgggatgagctttgatccaaaccttctccacaacaatggacataatgggtaccctaatggtacttcagcagcactgcgtgaaactggggttattgaaaaactgttaacctcttacggatttattcagtgttcagaacgtcaagctagacttttcttccactgttcacagtataatggcaacctgcaagacttaaaagtaggagatgatgttgaatttgaagtatcatcggaccgacggactgggaaacccattgctgttaaactggtgaagataaaacaagaaatcctccctgaagaacgaatgaatggacaagaagtgttttatctgacttacacccctgaagatgtcgaagggaacgttcagctggaaactggagataaaataaactttgtaattgataacaataaacatactggtgctgtaagtgctcgcaacattatgctgttgaaaaagaaacaagcccgctgtcagggagtagtttgtgccatgaaggaggcatttggctttattgaaagaggtgatgttgtaaaagagatattctttcactatagtgaatttaagggtgacttagaaaccttacagcctggcgatgatgtggaattcacaatcaaggacagaaatggtaaagaagttgcaacagatgtcagactattgcctcaaggaacagtcatttttgaagatatcagcattgaacattttgaaggaactgtaaccaaagttatcccaaaagtacccagtaaaaaccagaatgacccattgccaggacgcatcaaagttgactttgtgatccctaaagaacttccctttggagacaaagatacgaaatccaaggtgaccctgctggaaggtgaccatgttaggtttaatatttcaacagaccgacgtgacaaattagagcgagcaaccaatatagaagttctgtcaaatacatttcagttcactaatgaagcccgagaaatgggtgtgattgctgccatgagagatggttttggtttcatcaagtgtgtggatcgtgatgttcgtatgttcttccacttcagtgaaattctggatgggaaccagctccatattgcagatgaagtagagtttactgtggttcctgatatgctctctgctcaaagaaatcatgctattaggattaaaaaacttcccaagggcacggtttcatttcattcccattcagatcaccgttttctgggcacggtagaaaaagaagccactttttccaatcctaaaaccactagcccaaataaaggcaaagagaaggaggctgaggatggcattattgcttatgatgactgtggggtgaaactgactattgcttttcaagccaaggatgtggaaggatctacttctcctcaaataggagataaggttgaatttagtattagtgacaaacagaggcctggacagcaggttgcaacttgtgtgcgacttttaggtcgtaattctaactccaagaggctcttgggttatgtggcaactctgaaggataattttggatttattgaaacagccaatcatgataaggaaatctttttccattacagtgagttctctggtgatgttgatagcctggaactgggggacatggtcgagtatagcttgtccaaaggcaaaggcaacaaagtcagtgcagaaaaagtgaacaaaacacactcagtgaatggcattactgaggaagctgatcccaccatttactctggcaaagtaattcgccccctgaggagtgttgatccaacacagactgagtaccaaggaatgattgagattgtggaggagggcgatatgaaaggtgaggtctatccatttggcatcgttgggatggccaacaaaggggattgcctgcagaaaggggagagcgtcaagttccaattgtgtgtcctgggccaaaatgcacaaactatggcttacaacatcacacccctgcgcagggccacagtggaatgtgtgaaagatcagtttggcttcattaactatgaagtaggagatagcaagaagctctttttccatgtgaaagaagttcaggatggcattgagctacaggcaggagatgaggtggagttctcagtgattcttaatcagcgcactggcaagtgcagcgcctgtaatgtttggcgagtctgtgagggccccaaggctgttgcagctcctcgacctgatcggttggtcaatcgcttgaagaatatcactctggatgatgccagtgctcctcgcctaatggttcttcgtcagccaaggggaccagataactcaatggggtttggtgcagaaagaaagatccgtcaagctggtgtcattgactaaccacatccacaaagcacaccattaatccactatgatcaagttggggggaatctggtgaagggttctgaatatctccctcttcatccctcccgaaatctggaatacttattctattgagctattacaccagttttaacaccttcctcgtgttatgtttaaaaaaataaataaatttaagaaaaccattttaaataatgcacagttgcagcctggaaaaacttaaggtggcgccttatagtatcaattttaggagctttatttggtgcatttaacgcaactggtaattgcagaatccactttgcctgtgtaagtgaaaaatatagactgttatcttgttggccctatgaaattctgcacttttcattatatactctaccttcattaattacttctggcaagatgttctgccttagcactcagttgcattcttttcctttttcttcctgttcattatgctttaattctgaggaccatatgagggtagaatatattatcttttaaaaattacaaaaatttgtataggcaaaccatttcttaaagttgatggccaaattttaaaatgttatttttcatatcatttataatcttgtcacaatccacttaaagaagtttggttatatttcagtgaaaattttcttccagagtaggttttttttcgtgggttggggggtaactttactacaattagtaagtatggtgcagaatttcatgcaaatgaggagtgccagcagtgtgataatttaaacatatttaaacaaaaacaaaaaaaatgaatgcacaaacttgctgctgcttagatcactgcagcttctaggacccggtttcttttactgatttaaaaacaaaacaaaaaaaaataaaaaagttgtgcctg

SEQ ID NO: 221 - DNA, 2108 bp, Homo Sapiens
atgaacggcaccctggaccacccagaccaaccagatcttgatgctatcaagatgtttgtgggccaggttccaaggacctggtctgaaaaggacttgcgggaactcttcgaacagtatggtgctgtgtatgaaatcaacgtcctaagggataggagccaaaacccgcctcagagcaaagggtgctgttttgttacattttacacccgtaaagctgcattagaagctcagaatgctcttcacaacatgaaagtcctcccagggatgcatcaccctatacagatgaaacctgctgacagtgagaagaacaatgcagtggaagacaggaagctgtttattggtatgatttccaagaagtgcactgaaaatgacatccgagtcatgttctcttcgtttggacagattgaagaatgccggatattgcggggacctgatggcctgagccgaggttgtgcatttgtgacttttacaacaagagccatggcacagacggctatcaaggcaatgcaccaagcacagaccatggagggttgctcatcacccatggtggtaaaatttgctgatacacagaaggacaaagaacagaagagaatggcccagcagctccagcagcagatgcagcaaatcagcgcagcatctgtgtggggaaaccttgctggtctaaatactcttggaccccagtatttagcactttatttgcagctccttcagcagactgcctcctctgggaacctcaacaccctgagcagcctccacccaatgggagggttgaatgcaatgcagttacagaatttggctgcactagctgctgcagctagtgcagctcagaacacaccaagtggtaccaatgctctcactacatccagcagtcccctcagcgtgctcactagttcagggtcctcacctagctctagcagcagtaattctgtcaaccccatagcctcacttggagccctgcagacattagctggagcaacggctggcctcaatgttggctctttggcaggaatggctgctttaaatggtggcctgggcagcagtggcctttccaatggcaccgggagcaccatggaggccctcactcaggcctactcgggtatccagcaatatgctgctgctgcgctccccactctgtacaaccagaatcttctgacacagcagagtattggtgctgctggaagccagaaggaaggtccagagggagccaacctgttcatctaccacctgccccaggagtttggtgatcaggacctgctgcagatgtttatgccctttgggaatgtcgtgtctgccaaggttttcatagacaagcagacaaacctgagcaagtgttttggttttgtaagttacgacaatcctgtttcggcccaagctgccatccagtccatgaacggctttcagattggcatgaagcggcttaaagtgcagctcaaacgttcgaagaatgacagcaagccctactgagcgtgctcccctctgagactggagtgagagggtcttctgattcctgccgtttgttcatcgttgtgcctaaagcatgtcgatgtggcgtcaagtacatcgtccaaatccctgtctcttcagcttctctgatgcttgaactctcacctttgaccttgtgttgacctttgatgctgatgtgtatttttattatgtttgtttctttcttcgtttttttttctttttttctttcctttttttttccttttgtgctgccaaattggttttgctagaacgactgctgaaggggaaatatttaaacttgcatttgaatataaaaaaaatctatttttctagaacttcataagataaccacttgattttgtgattccaattctttgtaattgtcttcagagcagccctactagcacataccgcgtggtgtttgtatttctgtgaacacacagccagtccgtttctaggctttgtttctctgtgtgcttagttttaaagacaactttgaagtaaacaatgaaataaaagatgtcactaaaacctctgaggctcctgagcacattttgctgatacagtctgtggggcttgaggagaccgcatgtattgttctttcttttgtttttcttctgagttctcaactgcggagagcacctgaa

SEQ ID NO: 222 - DNA, 3633 bp, Homo Sapiens
cctgctgccgcctgggccccgccgagcggagctagcgccgcgcgcagagcacacgctcgcgctccagctcccctcctgcgcggttcatgactgtgtcccctgaccgcagcctctgcgagcccccgccgcaggaccacggcccgctccccgccgccgcgagggccccgagcgaaggaaggaagggaggcgcgctgtgcgccccgcggagcccgcgaaccccgctcgctgccggctgcccagcctggctggcaccatgctgcccgcgcgctgcgcccgcctgctcacgccccacttgctgctggtgttggtgcagctgtcccctgctcgcggccaccgcaccacaggccccaggtttctaataagtgaccgtgacccacagtgcaacctccactgctccaggactcaacccaaacccatctgtgcctctgatggcaggtcctacgagtccatgtgtgagtaccagcgagccaagtgccgagacccgaccctgggcgtggtgcatcgaggtagatgcaaagatgctggccagagcaagtgtcgcctggagcgggctcaagccctggagcaagccaagaagcctcaggaagctgtgtttgtcccagagtgtggcgaggatggctcctttacccaggtgcagtgccatacttacactgggtactgctggtgtgtcaccccggatgggaagcccatcagtggctcttctgtgcagaataaaactcctgtatgttcaggttcagtcaccgacaagcccttgagccagggtaactcaggaaggaaagatgacgggtctaagccgacacccacgatggagacccagccggtgttcgatggagatgaaatcacagccccaactctatggattaaacacttggtgatcaaggactccaaactgaacaacaccaacataagaaattcagagaaagtctattcgtgtgaccaggagaggcagagtgccctggaagaggcccagcagaatccccgtgagggtattgtcatccctgaatgtgcccctgggggactctataagccagtgcaatgccaccagtccactggctactgctggtgtgtgctggtggacacagggcgcccgctgcctgggacctccacacgctacgtgatgcccagttgtgagagcgacgccagggccaagactacagaggcggatgaccccttcaaggacagggagctaccaggctgtccagaagggaagaaaatggagtttatcaccagcctactggatgctctcaccactgacatggttcaggccattaactcagcagcgcccactggaggtgggaggttctcagagccagaccccagccacaccctggaggagcgggtagtgcactggtatttcagccagctggacagcaatagcagcaacgacattaacaagcgggagatgaagcccttcaagcgctacgtgaagaagaaagccaagcccaagaaatgtgcccggcgtttcaccgactactgtgacctgaacaaagacaaggtcatttcactgcctgagctgaagggctgcctgggtgttagcaaagaaggacgcctcgtctaaggagcagaaaacccaagggcaggtggagagtccagggaggcaggatggatcaccagacacctaaccttcagcgttgcccatggccctgccacatcccgtgtaacataagtggtgcccaccatgtttgcacttttaataactcttacttgcgtgttttgtttttggtttcattttaaaacaccaatatctaataccacagtgggaaaaggaaagggaagaaagactttattctctctcttattgtaagtttttggatctgctactgacaacttttagagggttttgggggggtgggggagggtgttgttggggctgagaagaaagagatttatatgctgtatataaatatatatgtaaattgtatagttcttttgtacaggcattggcattgctgtttgtttatttctctccctctgcctgctgtgggtggtgggcactctggacacatagtccagctttctaaaatccaggactctatcctgggcctactaaacttctgtttggagactgacccttgtgtataaagacgggagtcctgcaattgtactgcggactccacgagttcttttctggtgggaggactatattgccccatgccattagttgtcaaaattgataagtcacttggctctcggccttgtccagggaggttgggctaaggagagatggaaactgccctgggagaggaagggagtccagatcccatgaatagcccacacaggtaccggctctcagagggtccgtgcattcctgctctccggacccccaaagggcccagcattggtgggtgcaccagtatcttagtgaccctcggagcaaattatccacaaaggatttgcattacgtcactcgaaacgttttcatccatgcttagcatctactctgtataacgcatgagaggggaggcaaagaagaaaaagacacacagaagggcctttaaaaaagtagatatttaatatctaagcaggggaggggacaggacagaaagcctgcactgaggggtgcggtgccaacagggaaactcttcacctccctgcaaacctaccagtgaggctcccagagacgcagctgtctcagtgccaggggcagattgggtgtgacctctccactcctccatctcctgctgttgtcctagtggctatcacaggcctgggtgggtgggttgggggaggtgtcagtcaccttgttggtaacactaaagttgttttgttggttttttaaaaacccaatactgaggttcttcctgttccctcaagttttcttatgggcttccaggctttaagctaattccagaagtaaaactgatcttgggtttcctattctgcctcccctagaagggcaggggtgataacccagctacagggaaatcccggcccagctttccacaggcatcacaggcatcttccgcggattctagggtgggctgcccagccttctggtctgaggcgcagctccctctgcccaggtgctgtgcctattcaagtggccttcaggcagagcagcaagtggcccttagcgccccttcccataagcagctgtggtggcagtgagggaggttgggtagccctggactggtcccctcctcagatcacccttgcaaatctggcctcatcttgtattccaacccgacatccctaaaagtacctccacccgttccgggtctggaaggcgttggcaccacaagcactgtccctgtgggaggagcacaaccttctcgggacaggatctgatggggtcttgggctaaaggaggtccctgctgtcctggagaaagtcctagaggttatctcaggaatgactggtggccctgccccaacgtggaaaggtgggaaggaagccttctcccattagccccaatgagagaactcaacgtgccggagctgagtgggccttgcacgagacactggccccactttcaggcctggaggaagcatgcacacatggagacggcgcctgcctgtagatgtttggatcttcgagatctccccaggcatcttgtctcccacaggatcgtgtgtgtaggtggtgttgtgtggttttcctttgtgaaggagagagggaaactatttgtagctt

SEQ ID NO: 223 - DNA, 6817 bp, Homo Sapiens
gcagtcgggagccggccgtggtggctccgtgcgtccgagcgtccgtccgcgccgtcggccatggccaagcgctccaggggccccgggcgccgctgcctgttggcgctcgtgctgttctgcgcctgggggacgctggccgtggtggcccagaagccgggcgcagggtgtccgagccgctgcctgtgcttccgcaccaccgtgcgctgcatgcatctgctgctggaggccgtgcccgccgtggcgccgcagacctccatcctagatcttcgctttaacagaatcagagagatccaacctggggcattcaggcggctgaggaacttgaacacattgcttctcaataataatcagatcaagaggatacctagtggagcatttgaagacttggaaaatttaaaatatctctatctgtacaagaatgagatccagtcaattgacaggcaagcatttaagggacttgcctctctagagcaactatacctgcactttaatcagatagaaactttggacccagattcgttccagcatctcccgaagctcgagaggctatttttgcataacaaccggattacacatttagttccagggacatttaatcacttggaatctatgaagagattgcgactggactcaaacacacttcactgcgactgtgaaatcctgtggttggcggatttgctgaaaacctacgcggagtcggggaacgcgcaggcagcggccatctgtgaatatcccagacgcatccagggacgctcagtggcaaccatcaccccggaagagctgaactgtgaaaggccccggatcacctccgagccccaggacgcagatgtgacctcggggaacaccgtgtacttcacctgcagagccgaaggcaaccccaagcctgagatcatctggctgcgaaacaataatgagctgagcatgaagacagattcccgcctaaacttgctggacgatgggaccctgatgatccagaacacacaggagacagaccagggtatctaccagtgcatggcaaagaacgtggccggagaggtgaagacgcaagaggtgaccctcaggtacttcgggtctccagctcgacccacttttgtaatccagccacagaatacagaggtgctggttggggagagcgtcacgctggagtgcagcgccacaggccaccccccgccgcggatctcctggacgagaggtgaccgcacacccttgccagttgacccgcgggtgaacatcacgccttctggcgggctttacatacagaacgtcgtacagggggacagcggagagtatgcgtgctctgcgaccaacaacattgacagcgtccatgccaccgctttcatcatcgtccaggctcttcctcagttcactgtgacgcctcaggacagagtcgttattgagggccagaccgtggatttccagtgtgaagccaagggcaacccgccgcccgtcatcgcctggaccaagggagggagccagctctccgtggaccggcggcacctggtcctgtcatcgggaacacttagaatctctggtgttgccctccacgaccagggccagtacgaatgccaggctgtcaacatcatcggctcccagaaggtcgtggcccacctgactgtgcagcccagagtcaccccagtgtttgccagcattcccagcgacacaacagtggaggtgggcgccaatgtgcagctcccgtgcagctcccagggcgagcccgagccagccatcacctggaacaaggatggggttcaggtgacagaaagtggaaaatttcacatcagccctgaaggattcttgaccatcaatgacgttggccctgcagacgcaggtcgctatgagtgtgtggcccggaacaccattgggtcggcctcggtgagcatggtgctcagtgtgaatgttcctgacgtcagtcgaaatggagatccgtttgtagctacctccatcgtggaagcgattgcgactgttgacagagctataaactcaacccgaacacatttgtttgacagccgtcctcgttctccaaatgatttgctggccttgttccggtatccgagggatccttacacagttgaacaggcacgggcgggagaaatctttgaacggacattgcagctcattcaggagcatgtacagcatggcttgatggtcgacctcaacggaacaagttaccactacaacgacctggtgtctccacagtacctgaacctcatcgcaaacctgtcgggctgtaccgcccaccggcgcgtgaacaactgctcggacatgtgcttccaccagaagtaccggacgcacgacggcacctgtaacaacctgcagcaccccatgtggggcgcctcgctgaccgccttcgagcgcctgctgaaatccgtgtacgagaatggcttcaacacccctcggggcatcaacccccaccgactgtacaacgggcacgcccttcccatgccgcgcctggtgtccaccaccctgatcgggacggagaccgtcacacccgacgagcagttcacccacatgctgatgcagtggggccagttcctggaccacgacctcgactccacggtggtggccctgagccaggcacgcttctccgacggacagcactgcagcaacgtgtgcagcaacgaccccccctgcttctctgtcatgatcccccccaatgactcccgggccaggagcggggcccgctgcatgttcttcgtgcgctccagccctgtgtgcggcagcggcatgacttcgctgctcatgaactccgtgtacccgcgggagcagatcaaccagctcacctcctacatagacgcatccaacgtgtacgggagcacggagcatgaggcccgcagcatccgcgacctggccagccaccgcggcctgctgcggcagggcatcgtgcagcggtccgggaagccgctgctccccttcgccaccgggccgcccacggagtgcatgcgggacgagaacgagagccccatcccctgcttcctggccggggaccaccgcgccaacgagcagctgggcctgaccagcatgcacacgctgtggttccgcgagcacaaccgcattgccacggagctgctcaagctgaacccgcactgggacggcgacaccatctactatgagaccaggaagatcgtgggtgcggagatccagcacatcacctaccagcactggctcccgaagatcctgggggaggtgggcatgaggacgctgggagagtaccacggctacgaccccggcatcaatgctggcatcttcaacgccttcgccaccgcggccttcaggtttggccacacgcttgtcaacccactgctttaccggctggacgagaacttccagcccattgcacaagatcacctcccccttcacaaagctttcttctctcccttccggattgtgaatgagggcggcatcgatccgcttctcagggggctgttcggggtggcggggaaaatgcgtgtgccctcgcagctgctgaacacggagctcacggagcggctgttctccatggcacacacggtggctctggacctggcggccatcaacatccagcggggccgggaccacgggatcccaccctaccacgactacagggtctactgcaatctatcggcggcacacacgttcgaggacctgaaaaatgagattaaaaaccctgagatccgggagaaactgaaaaggttgtatggctcgacactcaacatcgacctgtttccggcgctcgtggtggaggacctggtgcctggcagccggctgggccccaccctgatgtgtcttctcagcacacagttcaagcgcctgcgagatggggacaggttgtggtatgagaaccctggggtgttctccccggcccagctgactcagatcaagcagacgtcgctggccaggatcctatgcgacaacgcggacaacatcacccgggtgcagagcgacgtgttcagggtggcggagttccctcacggctacggcagctgtgacgagatccccagggtagacctccgggtgtggcaggactgctgtgaagactgtaggaccagggggcagttcaatgccttttcctatcatttccgaggcagacggtctcttgagttcagctaccaggaggacaagccgaccaagaaaacaagaccacggaaaatacccagtgttgggagacagggggaacatctcagcaacagcacctcagccttcagcacacgctcagatgcatctgggacaaatgacttcagagagtttgttctggaaatgcagaagaccatcacagacctcagaacacagataaagaaacttgaatcacggctcagtaccacagagtgcgtggatgccgggggcgaatctcacgccaacaacaccaagtggaaaaaagatgcatgcaccatttgtgaatgcaaagacgggcaggtcacctgcttcgtggaagcttgcccccctgccacctgtgctgtccccgtgaacatcccaggggcctgctgtccagtctgcttacagaagagggcggaggaaaagccctaggctcctgggaggctcctcagagtttgtctgctgtgccatcgtgagatcgggtggccgatggcagggagctgcggactgcagaccaggaaacacccagaactcgtgacatttcatgacaacgtccagctggtgctgttacagaaggcagtgcaggaggcttccaaccagagcatctgcggagaaggaggcacagcaggtgcctgaagggaagcaggcaggagtcctagcttcacgttagacttctcaggtttttatttaattcttttaaaatgaaaaattggtgctactattaaattgcacagttgaatcatttaggcgcctaaattgattttgcctcccaacaccatttctttttaaataaagcaggatacctctatatgtcagccttgccttgttcagatgccaggagccggcagacctgtcacccgcaggtggggtgagtcttggagctgccagaggggctcaccgaaatcggggttccatcacaagctatgtttaaaaagaaaattggtgtttggcaaacggaacagaacctttgatgagagcgttcacagggacactgtctgggggtgcagtgcaagcccccggcctcttccctgggaacctctgaactcctccttcctctgggctctctgtaacatttcaccacacgtcagcatctaatcccaagacaaacattcccgctgctcgaagcagctgtatagcctgtgactctccgtgtgtcagctccttccacacctgattagaacattcataagccacatttagaaacaggtttgctttcagctgtcacttgcacacatactgcctagttgtgaaccaaatgtgaaaaaacctccttcatcccattgtgtatctgatacctgccgagggccaagggtgtgtgttgacaacgccgctcccagccggccctggttgcgtccacgtcctgaacaagagccgcttccggatggctcttcccaagggaggaggagctcaagtgtcgggaactgtctaacttcaggttgtgtgagtgcgttaaaaaaaaaaaaaaaaaagaatccctatacctcatttgtatttttaaaatgcgtgatgttttatgaaattgtgtccattttttaggtattagatatggcagaaaaaccatttccactatgcaaagttcttttagacgtcagtgaaaatcaactctcatacctcatggtctctctttaattgaccaaaaccttccatttttctctaaatacaaagcgatctgtgttctgagcaacctttccccgaacacacagcttcagtgcagcacgctgacctgagtatccaccatgtgccaggcacagtgctgggcacacgaggcaccaaggtccgggccacctgcccgcagcaaggcccagctgaggtggtggagggagcccctgaggtcaggggccgtttcggttcagggtggcaggtgtccagcactggggtatggcgtcgaggcttccatggggtgggggaggccagcttccttctgacaggatgggcgcatacagtgcctggtgtgatttgtgcacaacccgtgttccaggtgcacatcctcccaaggagacacccagacccttccagcacgggccggccaagttgctgcggcggaggcagcatttcagctgtgaggaaggtcattggattcatgtgttttatctgtaaaaatggttgtcttaacttcttaacctcatattggtaagtgattgataaaaattggttggtgtttcatgacatgtggacttcttttgaaatagcaagtcaaatgtagtgaccaaattgtggaagagatttctgtcaaataggaaatgtgtaagttcgtctaaaagctgatggttatgtaagttgctcaggcactcagatgacagcagattctgggttctgggagtgttctgtgcctcttacatgccctggaggcctcatggtctcagtgctgaggcggcacacctgtagcacacctgcgtaatgtgcggtctgggccagtcacaaggaattgtgttgtctaagccaaagggggaagctgactgtgatttaccaaaaaaaattctgtaattcaaaccaaaatgtctgcggaatcaccagtttgatactctctgtaatcagaacagtgggcagtgcctgggtgaacgtgtctagcagccactgtgcgggatcgctgtaacaggagtggaatgtacatatttatttacttttctaactgctccaacagccaaatgccttttttatgaccattgtattcagttcattaccaaagaaatgtttgcactttgtaatgatgcctttcagttcaaataaatgggtcacattttcaaatgga

SEQ ID NO: 224 - DNA, 2503 bp, Homo Sapiens
gcttctgactgtggaattggattctagctgtgtgtgtgttatatcctgttactgttgagacacagaggcgggagtcggcgggggaagatatgtgctgagattagtcagcctgccctccctctcccccaagaaactcaggccccatctggggagagtgagaacttaagaaacttgagacagggaaggagagccgggagcagccaaaacctgctaagtctcagaagactggtttctgcacaagggaatggaagaagtgactggaggtggctgtggattcaactctggcctgagattgattcccttgagataagttgttttctgcaaatccagtttgctgatgacatgcaggagttcaccaaattccccaccaaaactggccgaagatctttgtctcgctcgatctcacagtcctccactgacagctacagttcagctgcatcctacacagatagctctgatgatgaggtttctccccgagagaagcagcaaaccaactccaagggcagcagcaatttctgtgtgaagaacatcaagcaggcagaatttggacgccgggagattgagattgcagagcaagacatgtctgctctgatttcactcaggaaacgtgctcagggggagaagcccttggctggtgctaaaatagtgggctgtacacacatcacagcccagacagcggtgttgattgagacactctgtgccctgggggctcagtgccgctggtctgcttgtaacatctactcaactcagaatgaagtagctgcagcactggctgaggctggagttgcagtgttcgcttggaagggcgagtcagaagatgacttctggtggtgtattgaccgctgtgtgaacatggatgggtggcaggccaacatgatcctggatgatgggggagacttaacccactgggtttataagaagtatccaaacgtgtttaagaagatccgaggcattgtggaagagagcgtgactggtgttcacaggctgtatcagctctccaaagctgggaagctctgtgttccggccatgaacgtcaatgattctgttaccaaacagaagtttgataacttgtactgctgccgagaatccattttggatggcctgaagaggaccacagatgtgatgtttggtgggaaacaagtggtggtgtgtggctatggtgaggtaggcaagggctgctgtgctgctctcaaagctcttggagcaattgtctacattaccgaaatcgaccccatctgtgctctgcaggcctgcatggatgggttcagggtggtaaagctaaatgaagtcatccggcaagtcgatgtcgtaataacttgcacaggaaataagaatgtagtgacacgggagcacttggatcgcatgaaaaacagttgtatcgtatgcaatatgggccactccaacacagaaatcgatgtgaccagcctccgcactccggagctgacgtgggagcgagtacgttctcaggtggaccatgtcatctggccagatggcaaacgagttgtcctcctggcagagggtcgtctactcaatttgagctgctccacagttcccacctttgttctgtccatcacagccacaacacaggctttggcactgatagaactctataatgcacccgaggggcgatacaagcaggatgtgtacttgcttcctaagaaaatggatgaatacgttgccagcttgcatctgccatcatttgatgcccaccttacagagctgacagatgaccaagcaaaatatctgggactcaacaaaaatgggccattcaaacctaattattacagatactaatggaccatactaccaaggaccagtccacctgaaccacacactctaaagaaatattttttaagataacttttattttcttcttactcctttcctcttgatttttttcctataatttcattcttgttttttcatctcattatccaagttctgcagaccacacaggaacttgcttcatggctctttagatgaaatagaagttcagggttcctcactctagtcactaaagaaggattttactctcccagcccagaaaggtgattctttctttaccatttctggggactttagtcttaattaggtaccttattaacaggaaatgctaaggtaccttctctgtggaacaatctgcaatgtctaaatcgccttaaaagagcccatttcttagctgctgaaatcagtgctctttcacttcttcagagaagcagggatggtacctacccggcaggtaggttagatgtgggtggtgcatgttaatttcccttagaagttccaagccctgtttcctgcgtaaaggtggtatgtccagttcagagatgtgtataatgagcatggcttgttaagatcaggaggcccacttggatttatagtatagcccttcctccactcccaccagacttgctcatttttcgagtttttaactagactacactctattgagtttaattttgtcctctaggatttatttctgttgtccaaaaaaaaaaaaaaa

SEQ ID NO: 225 - DNA, 1286 bp, Homo Sapiens
ggtggctacggcgacgggagccggcggcgctgcgggtcagcggtcgcgtaggacccagcggactcggcagcctggggcgcccggcggagctgaaccgcggcccccggtggtgggctcagccggtcgagctgcgcgggagggtctcactgtcaccttggctggagtacagaggcgcaatctcagctcactgcaacttccacctccctggctcaagtgatctcccaccttagcctcccaagcaaatgaagataaaacaatgttcgccaacctaaaatacgtttccctgggaattttggtctttcagactaccagtttggttctaacaatgcgttattccagaactttaaaagaagaaggacctcgttatctatcttctacagcagtggttgttgctgaacttttgaagataatggcctgcattttattggtctacaaagacagcaaatgtagtctaagagcactgaatcgagtactacatgatgaaattcttaataaacctatggaaacacttaaacttgctattccatcagggatctatactcttcagaataatttactgtatgtggcactatcaaatctagatgcagctacttatcaggtcacgtatcagttaaaaattcttacaacagcattattttctgtgtctatgcttagtaaaaaattgggtgtataccagtggctgtccctagtaattttgatgacaggagttgcttttgtacagtggccctcagattctcagcttgattctaaggaactttcagctggttctcaatttgtaggactcatggcagttctcacagcatgtttttcaagtggctttgctggggtttactttgagaaaatcttaaaagaaacaaaacaatcagtgtggataagaaatattcagcttggtttctttggaagtatatttggattaatgggtgtatacatttatgatggagaactggtatcaaagaatggattttttcagggatataaccgactgacctggatagtagttgttcttcaggtaaagcatttaaagtcttagatttaatgctaataaactgtattttaatataaagaatcaaagtagctcctgatatactgatgtgagggggaaaaggtccctcctgttagtgctctcgtatctagtttattcaaggaagtgaaaatagaagtgatcttaatgctgtaatgaaatcttattttgtacaggggtctttaatgaactttgtggttttaaatgtaacataatgaaaatacaagtttaagaataaaagagttgaagctaaaggcaaatataa

SEQ ID NO: 226 - DNA, 840 bp, Homo Sapiens
agctgcttggagagctaagctggaagggtgcttatccctgcgtagaaacgcctgccaatgctttctcatttggacccagactccagatcgggagtcttatagctggatcagctaccaagagaagttgtaaaccaagaagagaaaagcatttcaatttgggacatttatttgcacctggaaatggggaatgggctgtcagaccagacttctatcctgtccaacctgccttcatttcagtctttccacattgttattctgggtttggactgtgctggaaagacaactgtcttatacaggctgcagttcaatgaatttgtaaataccgtacctaccaaaggatttaacactgagaaaattaaggtaaccttgggaaattctaaaacagtcacttttcacttctgggatgtaggtggtcaggagaaattaaggccactgtggaagtcatataccagatgcacagatggcattgtatttgttgtggactctgttgatgtcgaaaggatggaagaagccaaaactgaacttcacaaaataactaggatatcagaaaatcagggagtccctgtacttatagttgctaacaaacaagatttgaggaactcattgtcactttcagaaattgagaaattgttagcaatgggtgaactgagctcatcaactccttggcatttgcagcctacctgtgcaatcataggagatggcctaaaggaaggacttgagaaactacatgatatgatcattaaaagaagaaaaatgttgcggcaacagaaaaagaaaagatgaatatcaatacctattatatctgtgtggagtaggttttctctggtctgattttgacaa

SEQ ID NO: 227 - DNA, 3449 bp, Homo Sapiens
ggccgggggttgggcaggggcctggggggcttccctggggggcttgtcgccggggccgcctgggctttcaggtcttccgaggctgacattcacgtttcattctgccacactcgggaacggtgatcggggaagcatggggatccgggagaagcacccacaaaactagcatcctcctggaggagctcgggaataggatgagtgataatccacccagaatggaagtgtgtccttactgtaagaagccatttaaacgattaaaatcccacttgccatactgtaagatgataggaccaaccatacctactgatcaaaaagtttatcagtccaagccagctacactcccacgtgctaaaaagatgaaaggaccaatcaaagatttaattaaagctaaagggaaagagttagagacagagaatgaagaaagaaattctaagttggtggtggacaaaccagaacagacagtgaagacctttccactgccagctgttggtttggaaagagcagctactacaaaggcagataaagacatcaagaatccaatccaaccatccttcaaaatgttaaaaaatactaaaccaatgactactttccaagaagaaaccaaggctcagttttacgcatcagagaaaacctctcctaaaagagaacttgccaaagatttgcctaaatcaggagaaagtcgatgtaatccttcagaagctggagcgtctttactggttggctcaatagaaccttctttgtcaaatcaagatagaaaatattcctcaactctacctaatgatgtacaaactacctctggtgatctcaaattggacaaaattgatccccaaagacaggaacttctagtaaaattactagatgtgcctactggtgattgtcatatttctccaaagaatgtcagtgatggggttaaaagggtaagaacattattaagcaatgagagagattccaaaggcagggatcacctctcaggagtccctactgatgttacagttactgagactccagaaaagaacacagaatccctcattttaagccttaaaatgagctcattaggtaaaatccaagtcatggagaaacaagagaaaggacttaccctgggagtagagacgtgtgggagcaaaggaaatgcagagaaaagtatgtctgcaacagaaaagcaggaacggactgtcatgagccatggctgtgagaacttcaacaccagggattcagtcacaggaaaggagtctcaaggggaaagaccacatttaagtttgttcattccgagggagacgacttaccagtttcattctgtatcgcagtcaagtagtcaaagtcttgcctctctagctacaacatttcttcaagaaaagaaagcagaagcccagaatcatcattgtgtccctgatgtaaaggcattaatggagagtcccgagggacagttatctctggagcccaaatctgatagtcagttccaagcatcacacactgggtgccagagccctttatgttcagcccagcgtcacactcctcagagccccttcaccaatcatgctgcagctgctggcaggaagactcttcgcagctgcatggggctggagtggtttccagagctctatcctggttaccttggactaggggtgttgccagggaagcctcagtgttggaatgcaatgacccagaagccacaacttatcagtccccagggggaaagactctcacaaggctggatcaggtgcaacaccaccataaggaagagtggattcggtggcatcacgatgctcttcacaggatacttcgtcctgtgttgtagctggagtttcagacgtctgaaaaaattgtgccgacccctgccctggaagagcacagtacctccatgcattggtgtggcgaagacgactggggattgccgctctaaaacatgtttggattaggaagcacgtttaagtaggagaagccttcgtgacttctctctagtgccttcgtgccctgtgttgcccactgaattgccctgtaacacctaagtgtagtggtagcattaagggatagcttttcagccctcaaggttatcaggagcatttgtatcactgctataaataaagtagtatcacttgtcataatcagggtgctgaaacataatgaaaaggtttaacttagtcacagtaaatattttatatccctgaaaataagttatttaatgagaatagaactatttaatgatccatgagtcctaaaaggatatctgccttgtattgccaagtttaaggcaaaggtgagatcctgtattaataagaagacagcttttttgtttgacattggtaagtaccaagaattctaactcacatatagtaggaaacaacaaaaagtctccactgacttctttgaattagatactgagaatccacaatacagtagtgtggataactttcaagaagccattggaaacatctccacattctgggatgacttgtaaatgtctacagagtaatggaaggaaaggcttccttgtctgctcattgctgccacctgggttgggaaaataattgaagatgttttctcaagtccttcaagaatctcttcttaatgttcagaatagtttaagagcgttgttgaggtaaactgatagctgattattttctgagatttagatctaaacaaactcagcatgacgaggaagcacacttcacagctccagggtgcaatactgatgtaaagttgcctcgtgaggatacatttttcgctcatgtatgcaaaattcctatcagttcatttgcacagccagttccaatcatgtatgtgatcaccagattaaaagcttcatccagaaagacaagactcctcagaacgaatagtagacaagtaagactgctacccacagaagccagtacgcttcaggtgtgaggcggggtaactactcatctcttcacagagccaaggaaagaaaaagaacgtctctaacatgatttaccattttaaacagccttataagttttgtctcttaaaatcatgctgcagaaggagggggtaaaagtcgtgttctgccctgtctgtggcattggagtgccccgctaggtaagaagcaacgcttagatcttgcttccaggcagcagcttgaattcccgaatcttcctgcaaggtgcatacaaatgcagcgtgagaatccatacacgtaatccatattcaccttcccatccatcccgcagaagaggcatggtgacacccaggctactgtccatgcttgagaggacgtatttgaaggttctgttactacaagttgggaatattcacggacatgcctgaataccccggctgtaactcacacgtggtctgtgtaagtggattaacctcggggcggccttgtttaatcctgaataatatctgaaagactgagtttacttgggaatgtgtagtttttctaatgcacattaaaatttattttagctgttaaaaataaaatcattttatta

SEQ ID NO: 228 - DNA, 776 bp, Homo Sapiens
gtgaccatgtaccagctgcgtcctctgggccacgctccacttgcccgcttccacccggaaagccccccaggctgagtgcggcatgatctccatcaccgaatggcagaagattggtgtggggatcaccggtttcggcatcttcttcatcctctttggaacactcctgtactttgattccgtgctcctggcctttggaaacctgctgttcctgacgggcctgtccctcatcattggcctgaggaagaccttttggttcttcttccaacggcacaaactcaagggaaccagcttcctcctggggggtgtggttatcgtgctcctacgctggcccctcctcggcatgttcctggaaacctacggattcttcagcctctttaagggctttttccctgtcgccttcggcttcctgggcaatgtctgcaacatccccttcctgggtgcgctgttccggagacttcaaggcactagctcgatggtctgaaaaacagagatgagctccttgaacttggatcattggttgagggggctagagggagaatgggaaccaccccctcagtcccctgcactgactcactccccgacatatccggacctccccaagtccagaaggaaggaatggagctgagcaactgacgtcaaatccccaagtcgactcaagaggctgccaggaagcagagatgcagaccccaaggagactgggctggggctggtatcacaccctcactctatatttatgggaggaaaagtgaagattaaattcccaagttgtgcgtgtg

SEQ ID NO: 229 - DNA, 1868 bp, Homo Sapiens
aaaacacccctcatccagtctcttccagcctagagatcctggcctacccctccgccaaagcgcgcactgagtgcaaaccccagagtcaatccctgtcccggctccgccccccgcgtccgaatcccgcccagccgggccctcaagcccagtcgggactcgagcctagggaggcgaggttcccgcaccggatagaaaatgtcactgaaattcacaaatgcaaaacggattgaaggacttgatagtaatgtgtggattgaatttaccaaattggctgcagacccttctgttgtgaatcttggccaaggctttccagatatatcccctcctacatatgtaaaagaagaattatcaaagattgcagcaatcgatagcctgaatcagtatacacgaggctttggccatccatcacttgtgaaagctctgtcctatctgtatgaaaagctttatcaaaagcaaattgattcaaataaagaaatccttgtgacagtaggagcatatggatctctttttaacaccattcaagcattaattgatgagggagatgaagtcatactaatagtgcctttctatgactgctatgagcccatggtgagaatggctggagcaacacctgtttttattcccctgagatctaaacctgtttatggaaaaagatggtctagttctgactggacattagatcctcaagaactggaaagtaaatttaattccaaaaccaaagctattatactaaatactccacataacccacttggcaaggtgtataacagagaggaactgcaagtaattgctgacctttgcatcaaatatgacacactctgcatcagcgatgaggtttatgaatggcttgtatattctggaaataagcacttaaaaatagctacttttccaggtatgtgggagagaacaataacaataggaagtgctggaaagactttcagtgtaactggctggaagcttggctggtccattggtccaaatcatttgataaaacatttacagacagttcaacaaaacacgatttatacttgtgcaactcctttacaggaagccttggctcaagctttctggattgacatcaagcgcatggatgacccagaatgttactttaattctttgccaaaagagttagaagtaaaaagagatcggatggtacgtttacttgaaagtgttggcctaaaacccatagttcctgatggaggatacttcatcatcgctgatgtgtctttgctagatccagacctctctgatatgaagaataatgagccttatgactataagtttgtgaaatggatgactaaacataagaaactatcagccatccccgtttcagcattctgtaactcagagactaaatcacagtttgagaagtttgtgcgtttttgcttcattaaaaaagacagcacactggatgctgctgaagaaatcatcaaggcatggagtgtacagaagtcttgatttgtgcagaatggattaatgtttctgttagatgacctagtatggaattgttacttagtgctgccacctgctggatgttaaaaggtatttcagtacaactggaatttaaatatttccattgtttttccaaagcagttaacccaactcctaacaacattttcgggggatctgaccttttttttccagttgaaatgtattaacacaccttccacaatcattttataagagtcagcataacatagtggataagaaatgtgagatgtttaacctctcagtaactcggttctctcattataaaataggaataaaatcagtacctgtttcatatgaaggtcgtttctgagaattaaatggactaatgtatgcaaaaagcctggcaaacaataaacactcatctgactttagccggt

SEQ ID NO: 230 - DNA, 1801 bp, Homo Sapiens
gaggcaccctcgggctcgagacagcggcgacgtttaaagctgagcgacccagtgccactggagacggtcagcttctccactcaggctcctccagcccgagccagaagaccccctcccccagaattctgggggccgatggaagggagccgagtcagatcgcgaggtacccagagccgacagaccggagcgacagggagttgccagaagccccgcccctaggagtgatcggaaagcctcacccatccgggtgaggaacccggagggaccgcctccgggcggagcccgccgaccatggctacgcccctggtggcgggtcccgcagctctacgcttcgccgccgcggctagctggcaggttgtgcgcggacgctgcgtggaacattttccgcgagtactggagtttctgcgatctctgcgcgctgttgcccctggcttggttcgctaccggcaccacgaacgcctttgtatgggcctaaaggccaaggtggtggtggagctgatcctgcagggccggccttgggcccaagtcctgaaagccctgaatcaccactttccagaatctggacctatagtgcgggatcccaaggctacaaagcaggatctgaggaagattttggaggcacaggaaactttttaccagcaggtgaagcagctgtcagaggctcctgtggatttggcctcgaagctgcaggaacttgaacaagagtatggggaaccctttctggctgccatggaaaagctgctttttgagtacttgtgtcagctggagaaagcactgcctacaccgcaggcacagcagcttcaggatgtgctgagttggatgcagcctggagtctctatcacctcttctcttgcctggagacaatatggtgtggacatggggtggctgcttccagagtgctctgttactgactcagtgaacctggctgagcccatggaacagaatcctcctcagcaacaaagactagcactccacaatcccctgccaaaagccaagcctggcacacatcttcctcagggaccatcttcaaggacgcacccagaacctctagctggccgacacttcaatctggcccctctaggccgacgaagagttcagtcccaatgggcctccactaggggaggccataaggagcgccccacagtcatgctgtttccctttaggaatctcggctcaccaacccaggtcatatctaagcctgagagcaaggaagaacatgcgatatacacagcagacctagccatgggcacaagagcagcctccactgggaagtctaagagtccatgccagaccctggggggaagggctctgaaggagaacccagttgacttgcctgccacagagcaaaaggagaattgcttggattgctacatggaccccctgagactatcattattacctcctagggccaggaagccagtgtgtcctccgtctctgtgcagctccgtcattaccataggggacttggttttagactctgatgaggaagaaaatggccagggggaaggaaaggaatctctggaaaactatcagaagacaaagtttgacaccttgatacccactctctgtgaatacctacccccttctggccacggtgccatacctgtttcttcctgtgactgtagagacagttctagacctttgtgatagaactaaaatgctctctgtactctagtctcctgcctcctcagctctgcaagtagtttagtaggaatgaagtggaagtccaggcttggattgcctaactacactgctaaaaatatttgtaatccttaataattaaactttggatttgttaaaa

SEQ ID NO: 231 - DNA, 2063 bp, Homo Sapiens
ctcccgccgccgtcacccaggaaaccggccgcaatcgccggccgacctgaagctggtttcatggcagcctcaaagaaggcagttttggggccattggtgggggcggtggaccagggcaccagttcgacgcgctttttggttttcaattcaaaaacagctgaactacttagtcatcatcaagtagaaataaaacaagagttcccaagagaaggatgggtggaacaggaccctaaggaaattctacattctgtctatgagtgtatagagaaaacatgtgagaaacttggacagctcaatattgatatttccaacataaaagctattggtgtcagcaaccagagggaaaccactgtagtctgggacaagataactggagagcctctctacaatgctgtggtgtggcttgatctaagaacccagtctaccgttgagagtcttagtaaaagaattccaggaaataataactttgtcaagtccaagacaggccttccacttagcacttacttcagtgcagtgaaacttcgttggctccttgacaatgtgagaaaagttcaaaaggccgttgaagaaaaacgagctctttttgggactattgattcatggcttatttggagtttgacaggaggagtcaatggaggtgtccactgtacagatgtaacaaatgcaagtaggactatgcttttcaacattcattctttggaatgggataaacaactctgcgaattttttggaattccaatggaaattcttccaaatgtccggagttcttctgagatctatggcctaatgaaagctggggccttggaaggtgtgccaatatctgggtgtttaggggaccagtctgctgcattggtgggacaaatgtgcttccagattggacaagccaaaaatacgtatggaacaggatgtttcttactatgtaatacaggccataagtgtgtattttctgatcatggccttctcaccacagtggcttacaaacttggcagagacaaaccagtatattatgctttggaaggttctgtagctatagctggtgctgttattcgctggctaagagacaatcttggaattataaagacctcagaagaaattgaaaaacttgctaaagaagtaggtacttcttatggctgctacttcgtcccagcattttcggggttatatgcaccttattgggagcccagcgcaagagggataatctgtggactcactcagttcaccaataaatgccatattgcttttgctgcattagaagctgtttgtttccaaactcgagagattttggatgccatgaatcgagactgtggaattccactcagtcatttgcaggtagatggaggaatgaccagcaacaaaattcttatgcagctacaagcagacattctgtatataccagtagtgaagccctcaatgcccgaaaccactgcactgggtgcggctatggcggcaggggctgcagaaggagtcggcgtatggagtctcgaacccgaggatttgtctgccgtcacgatggagcggtttgaacctcagattaatgcggaggaaagtgaaattcgttattctacatggaagaaagctgtgatgaagtcaatgggttgggttacaactcaatctccagaaagtggtattccataaaacctaccaactcatggattcccaagatgtgagctttttacataatgaaagaacccagcaattctgtctcttaatgcaatgacactattcatagactttgattttatttataagccacttgctgcatgaccctccaagtagacctgtggcttaaaataaagaaaatgcagcaaaaagaatgctatagaaatatttggtggttttttttttttttaaacatccacagttaaggttgggccagctacctttggggctgaccccctccattgccataacatcctgctccattccctctaagatgtaggaagaattcggatccttaccattggaatcttccatcgaacatactcaaacacttttggaccaggatttgagtctctgcatgacatatacttgattaaaaggttattactaacctgttaaaaatc

SEQ ID NO: 232 - DNA, 1479 bp, Homo Sapiens
gttcagcatttctactccttccaagaagagcagcaaagctgaagtagcagcagcagcaccagcagcaacagcaaaaaacaaacatgagtgtgaagggcatggctatagccttggctgtgatattgtgtgctacagttgttcaaggcttccccatgttcaaaagaggacgctgtctttgcataggccctggggtaaaagcagtgaaagtggcagatattgagaaagcctccataatgtacccaagtaacaactgtgacaaaatagaagtgattattaccctgaaagaaaataaaggacaacgatgcctaaatcccaaatcgaagcaagcaaggcttataatcaaaaaagttgaaagaaagaatttttaaaaatatcaaaacatatgaagtcctggaaaagagcatctgaaaaacctagaacaagtttaactgtgactactgaaatgacaagaattctacagtaggaaactgagacttttctatggttttgtgactttcaacttttgtacagttatgtgaaggatgaaaggtgggtgaaaggaccaaaaacagaaatacagtcttcctgaatgaatgacaatcagaattccactgcccaaaggagtccaacaattaaatggatttctaggaaaagctaccttaagaaaggctggttaccatcggagtttacaaagtgctttcacgttcttacttgttgcattatacattcatgcatttctaggctagagaaccttctagatttgatgcttacaactattctgttgtgactatgagaacatttctgtctctagaagtcatctgtctgtattgatctttatgctatattactatctgtggttacggtggagacattgacattattactggagtcaagcccttataagtcaaaagcatctatgtgtcgtaaaacattcctcaaacattttttcatgcaaatacacacttctttccccaaacatcatgtagcacatcaatatgtagggagacattcttatgcatcatttggtttgttttataaccaattcattaaatgtaattcataaaatgtactatgaaaaaaattatacgctatgggatactggcaaaagtgcacatatttcataaccaaattagtagcaccagtcttaatttgatgtttttcaacttttattcattgagatgttttgaagcaattaggatatgtgtgtttactgtactttttgttttgatccgtttgtataaatgatagcaatatcttggacacatctgaaatacaaaatgtttttgtctaccaaagaaaaatgttgaaaaataagcaaatgtatacctagcaatcacttttactttttgtaattctgtctcttagaaaaatacataatctaatcaatttctttgttcatgcctatatactgtaaaatttaggtatactcaagactagtttaaagaatcaaagtcatttttttctctaataaactaccacaacctttcttttttaaaaaaa

SEQ ID NO: 233 - DNA, 1368 bp, Homo Sapiens
aggagagaagacgtgcagggaccccgcgcacaggagctgccctcgcgacatgggtcacccgccgctgctgccgctgctgctgctgctccacacctgcgtcccagcctcttggggcctgcggtgcatgcagtgtaagaccaacggggattgccgtgtggaagagtgcgccctgggacaggacctctgcaggaccacgatcgtgcgcttgtgggaagaaggagaagagctggagctggtggagaaaagctgtacccactcagagaagaccaacaggaccctgagctatcggactggcttgaagatcaccagccttaccgaggttgtgtgtgggttagacttgtgcaaccagggcaactctggccgggctgtcacctattcccgaagccgttacctcgaatgcatttcctgtggctcatcagacatgagctgtgagaggggccggcaccagagcctgcagtgccgcagccctgaagaacagtgcctggatgtggtgacccactggatccaggaaggtgaagaagggcgtccaaaggatgaccgccacctccgtggctgtggctaccttcccggctgcccgggctccaatggtttccacaacaacgacaccttccacttcctgaaatgctgcaacaccaccaaatgcaacgagggcccaatcctggagcttgaaaatctgccgcagaatggccgccagtgttacagctgcaaggggaacagcacccatggatgctcctctgaagagactttcctcattgactgccgaggccccatgaatcaatgtctggtagccaccggcactcacgaaccgaaaaaccaaagctatatggtaagaggctgtgcaaccgcctcaatgtgccaacatgcccacctgggtgacgccttcagcatgaaccacattgatgtctcctgctgtactaaaagtggctgtaaccacccagacctggatgtccagtaccgcagtggggctgctcctcagcctggccctgcccatctcagcctcaccatcaccctgctaatgactgccagactgtggggaggcactctcctctggacctaaacctgaaatccccctctctgccctggctggatccgggggacccctttgcccttccctcggctcccagccctacagacttgctgtgtgacctcaggccagtgtgccgacctctctgggcctcagttttcccagctatgaaaacagctatctcacaaagttgtgtgaagcagaagagaaaagctggaggaaggccgtgggccaatgggagagctcttgttattattaatattgttgccgctgttgtgttgttgttattaattaatattcatattatttattttatacttacataaagattttgtaccagtgga

SEQ ID NO: 234 - DNA, 2099 bp, Homo Sapiens
gatttttgacgattccttccctgagaagagggcgaggagaagaagaaagaaaaaggagaactgaattgaattagattagcatgaaggaccttttcacgcggagactaaaagtactgcgcataacttcctgctcagaaatatatgcaaataagaagacagatcctgaaagagcaagctaggagagtacaggtcgtgctgcagttagttcattgaaaactcatttgctcttggagcagtcaggcagtgactgccttcggctttttttctgctgactaagatctcctatagagagctacaacaatgcccaaaagaaaggctgcaggtcaaggtgatatgaggcaggagccaaagagaagatctgccaggttgtctgctatgcttgtgccagttacaccagaggtgaagcctaaaagaacatcaagttcaaggaaaatgaagacaaaaagtgatatgatggaagaaaacatagatacaagtgcccaagcagttgctgaaaccaagcaagaagcagttgttgaagaagactacaatgaaaatgctaaaaatggagaagccaaaattacagaggcaccagcttctgaaaaagaaattgtggaagtaaaagaagaaaatattgaagatgccacagaaaagggaggagaaaagaaagaagcagtggcagcagaagtaaaaaatgaagaagaagatcagaaagaagatgaagaagatcaaaacgaagagaaaggggaagctggaaaagaagacaaagatgaaaaaggggaagaagatggaaaagaggataaaaatggaaatgagaaaggagaagatgcaaaagagaaagaagatggaaaaaaaggtgaagacggaaaaggaaatggagaagatggaaaagagaaaggagaagatgaaaaagaggaagaagacagaaaagaaacaggagatggaaaagagaatgaagatggaaaagagaagggagataaaaaagaggggaaagatgtaaaagtcaaagaagatgaaaaagagagagaagatggaaaagaagatgaaggtggaaatgaggaagaagctggaaaagagaaagaagatttaaaagaagaggaagaaggaaaagaggaagatgagatcaaagaagatgatggaaaaaaagaggagccacagagtattgtttaaaactgccctatgtagtttcataatttggtaacatgtaccttcatgttgtaaagttaatagagataaatatttttatcaaaaattttataaacacagcctttctttagcattgatttaatttcagaacatcttcatattgattattagccataaagtttctaacatgaaacatttatctataaattttgtgattatagtagtggaatacatagaaaaaaatatgctttcaactttgtgagtgaatttcgtgttgtgtaagttatatgtcaaatctttgaattttaattttactcttttatacatgtgataatttcataaagtgagggatcccaaaaaaagagtttcatccaacattcttgttctgcaggttgcttttataaagaaggtgaactattttcatgtaatgttaagagttaaacttatctttcccaaatataactttattattagcttgggaaaaatgaaattgtattcccatttttaaaataaatacaaatgtttatttcagaagggcagttttgattatatgtgaatacacaaattttactggatttatcttaataaaaagactctgacgatgattgtgttttgttatatcttcaaaaatatagctagtgaaatattgtgcttaatttttttctattgtgttattcatgaaaatatttaatattcactgacataaaattaatataaagtaaaattcaccattttaattataataaaaataaagtatataattcaatggttgtcagtatattcacaatgttgtgtccactgtttaattccagagaatttttatcacccaaataagaaacaaagcaccaattagcagtctcttcccattttcgcccaacttatcccccacctccatcccttggcaaccactaatctgccttctatctctatggatttgcctattctgaacatttattataaatggaatcacataa

SEQ ID NO: 235 - DNA, 644 bp, Homo Sapiens
atgtcctgccagcagagccagcagcagtgccagccccctcccaagtgcacccccaagtgccctcccaagtgccccaccccaaagtgtcccccaaagtgtccccctaagtgccctcctgtctcttcctgctgcagtgtcagctccggaggctgctgtggctccagctctgggggcagctgtggctccagctctgggggatgctgcagttctgggggaggtggctgctgcctgagccaccacaggcgccgtaggtcccactgccacagaccccagagctctggctgctgcagccagccctcggggggctccagctgctgtggcggggggagtggccagcactctggaggctgctgctgaagtggaccctgagcctagaagagcagaatccaggaccgcaaactgccaaggacatcccccttctcctactaggcctgcctgagaggctcacaggtccaagggaaagctctgaacttgccaagagcatatcttttccctggagtccagaaactcagatcctctcctggatctccattcactggccttggacctcacctttgtggctaccctcccacgctctgtctaagcccctagcttactcaatgtcatttgcagcgtgcatctgctgattaaaggactaaaacaag

SEQ ID NO: 236 - DNA, 3040 bp, Homo Sapiens
gagtaggtccggtgcctctgggccctcggggtcccctctcctgcaggctcgaggtgggcggggagaagggggacgggcgcggacccgggtcccagggccaggcctcccttgtgagtagactatgcaaagaaaaagtgggccaccatatctggaaactacagtctatgctttgaagcgcaaaagggaataaacatttaaagactcccccggggacctggaggatggacttttccatggtggccggagcagcagcttacaatgaaaaatcagagactggtgctcttggagaaaactatagttggcaaattcccattaaccacaatgacttcaaaattttaaaaaataatgagcgtcagctgtgtgaagtcctccagaataagtttggctgtatctctaccctggtctctccagttcaggaaggcaacagcaaatctctgcaagtgttcagaaaaatgctgactcctaggatagagttatcagtctggaaagatgacctcaccacacatgctgttgatgctgtggtgaatgcagccaatgaagatcttctgcatgggggaggcctggccctggccctggtaaaagctggtggatttgaaatccaagaagagagcaaacagtttgttgccagatatggtaaagtgtcagctggtgagatagctgtcacgggagcagggaggcttccctgcaaacagatcatccatgctgttgggcctcggtggatggaatgggataaacagggatgtactggaaagctgcagagggccattgtaagtattctgaattatgtcatctataaaaatactcacattaagacagtagcaattccagccttgagctctgggatttttcagttccctctgaatttgtgtacaaagactattgtagagactatccgggttagtttgcaagggaagccaatgatgagtaatttgaaagaaattcacctggtgagcaatgaggaccctactgttgctgcctttaaagctgcttcagaattcatcctagggaagagtgagctgggacaagaaaccaccccttctttcaatgcaatggtcgtgaacaacctgaccctccagattgtccagggccacattgaatggcagacggcagatgtaattgttaattctgtaaacccacatgatattacagttggacctgtggcaaagtcaattctacaacaagcaggagttgaaatgaaatcggaatttcttgccacaaaggctaaacagtttcaacggtcccagttggtactggtcacaaaaggatttaacttgttctgtaaatatatataccatgtactgtggcattcagaatttcctaaacctcagatattaaaacatgcaatgaaggagtgtttggaaaaatgcattgagcaaaatataacttccatttcctttcctgcccttgggactggaaacatggaaataaagaaggaaacagcagcagagattttgtttgatgaagttttaacatttgccaaagaccatgtaaaacaccagttaactgtaaaatttgtgatctttccaacagatttggagatatataaggctttcagttctgaaatggcaaagaggtccaagatgctgagtttgaacaattacagtgtcccccagtcaaccagagaggagaaaagagaaaatgggcttgaagctagatctcctgccatcaatctgatgggattcaacgtggaagagatgtatgaggcccacgcatggatccaaagaatcctgagtctccagaaccaccacatcattgagaataatcatattctgtaccttgggagaaaggaacatgacattttgtctcagcttcagaaaacttcaagtgtctccatcacagaaattatcagcccaggaaggacagagttagagattgaaggagcccgggctgacctcattgaggtggttatgaacattgaagatatgctttgtaaagtacaggaggaaatggcaaggaaaaaggagcgaggcctttggcgctcgttaggacagtggactattcagcaacaaaaaacccaagacgaaatgaaagaaaatatcatatttctgaaatgtcctgtgcctccaactcaagagcttctagatcaaaagaaacagtttgaaaaatgtggtttgcaggttctaaaggtggagaagatagacaatgaggtccttatggctgcctttcaaagaaagaagaaaatgatggaagaaaaactgcacaggcaacctgtgagccataggctgtttcagcaagtcccataccagttctgcaatgtggtatgcagagttggctttcaaagaatgtactcgacaccttgcgatccaaaatacggagctggcatatacttcaccaagaacctcaaaaacctggcagagaaggccaagaaaatctctgctgcagataagctgatctatgtgtttgaggctgaagtactcacaggcttcttctgccagggacatccgttaaatattgttcccccaccactgagtcctggagctatagatggtcatgacagtgtggttgacaatgtctccagccctgaaacctttgttatttttagtggcatgcaggctatacctcagtatttgtggacatgcacccaggaatatgtacagtcacaagattactcatcaggaccaatgagaccctttgcacagcatccttggaggggattcgcaagtggcagccctgttgattaatctctacatcattttaacagctggtatggccttaccttgggtgaactaaccaaataatgaccatcgatggctcaaagagtggcttgaatatatcccatgggttatctgtatggactgactgggttattgaaaggactagccacatactagcatcttagtgcctttatctgtctttatgtcttggggttggggtaggtagataccaaatgaaacactttcaggaccttccttcctcttgcagttgttctttaatctcctttactagaggagataaatattttgcatataatgaagaaatttttctagtatataacgcaggccttttattttctaaaatgatgatagtataaaaatgttag

SEQ ID NO: 237 - DNA, 4055 bp, Homo Sapiens
aggttgcatgatggaatttgaacattacttcaagaggttttgtattttggattagttaattgggtttgtcctctgctgactgtttcttcggatgcattttttggtgtgctcttgagggattaaatgcaaagagatcacaccatggactacaaggaaagctgcccaagtgtaagcattcccagctccgatgaacacagagagaaaaagaagaggtttactgtttataaagttctggtttcagtgggaagaagtgaatggtttgtcttcaggagatatgcagagtttgataaactttataacactttaaaaaaacagtttcctgctatggccctgaagattcctgccaagagaatatttggtgataattttgatccagattttattaaacaaagacgagcaggactaaacgaattcattcagaacctagttaggtatccagaactttataaccatccagatgtcagagcattccttcaaatggacagtccaaaacaccagtcagatccatctgaagatgaggatgaaagaagttctcagaagctacactctacctcacagaacatcaacctgggaccgtctggaaatcctcatgccaaaccaactgactttgatttcttaaaagttattggaaaaggcagctttggcaaggttcttcttgcaaaacggaaactggatggaaaattttatgctgtcaaagtgttacagaaaaaaatagttctcaacagaaaagagcaaaaacatattatggctgaacgtaatgtgctcttgaaaaatgtgaaacatccgtttttggttggattgcattattccttccaaacaactgaaaagctttattttgttctggattttgttaatggaggggagctttttttccacttacaaagagaacggtcctttcctgagcacagagctaggttttacgctgctgaaattgctagtgcattgggttacttacattccatcaaaatagtatacagagacttgaaaccagaaaatattcttttggattcagtaggacatgttgtcttaacagattttgggctttgtaaagaaggaattgctatttctgacaccactaccacattttgtgggacaccagagtatcttgcacctgaagtaattagaaaacagccctatgacaatactgtagattggtggtgccttggggctgttctgtatgaaatgctgtatggattgcctcctttttattgccgagatgttgctgaaatgtatgacaatatccttcacaaacccctaagtttgaggccaggagtgagtcttacagcctggtccattctggaagaactcctagaaaaagacaggcaaaatcgacttggtgccaaggaagactttcttgaaattcagaatcatcctttttttgaatcactcagctgggctgaccttgtacaaaagaagattccaccaccatttaatcctaatgtggctggaccagatgatatcagaaactttgacacagcatttacagaagaaacagttccatattctgtgtgtgtatcttctgactattctatagtgaatgccagtgtattggaggcagatgatgcattcgttggtttctcttatgcacctccttcagaagacttatttttgtgagcagtttgccattcagaaaccattgagcaaaataagtctatagatgggactgaaacttctatttgtgtgaatatattcaaatatgtataactagtgcctcatttttatatgtaatgatgaaaactatgaaaaaatgtattttcttctatgtgcaagaaaaatagggcatttcaaagagctgttttgattaaaatttatattcttgtttaataagcttatttttaaacaatttaaaagctattattcttagcattaacctatttttaaagaaaccttttttgctattgactgttttttccctctaagtttacactaacatctacccaagatagactgttttttaacagtcaatttcagttcagctaacatatattaatacctttgtaactctttgctatggcttttgttatcacaccaaaactatgcaattggtacatggttgtttaagaagaaaccgtatttttccatgataaatcactgtttgaaatatttggttcatggtatgatcgaaatgtaaaagcataattaacacattggctgctagttaacaattggaataactttattctgcagatcatttaagaagtaacaggccgggcgcggtggctcacgcctgtaatcccagcactttgggaggctgaggcgggcagatcacctgaggtcaggagttggagaccagcctgaccaacatggacaaaccccgtctctactaaaaatacaaaattggcagggtgtggtggcacatgcctataatcccagctacttgggaggctaaggcaggagaatcgcttgaacccgggaggcggaggttgcagtgagccgagatcgcaccattgcactcctgcctgggcaacaagagtgaaactccatctccaaaaaaaaaaagaaaaagtaacaaaaggaaattatttgtttttgaaataccagttcaactttgtggattatttttcctctgaaggaaaagaaaaggcttaatggttaggatttttaagtattcccaaagatctgaagggtaataaaatgtactggattttttaaggtggtaccaaaaatgaatgtctgtcatatatttatattacaaatacattatatttatgttctattcatcttttgaatgtttagtatgctattaagtcattctgaatctttgtatttgcttttgcaaataggtatttcaaagctcttttcctaactggttaagtaaaataaaaaattgagctttctagaatatttgcctaattgggaattaaaaagtaaaataataggccaggcatggtggctcatgcctataagcaccctgggaggccgaggcaggcagattatttgagctcaggagtttgagaccatcctgggcaacatggcgaaaccctatctctacaaaaaatacaaaaattagccagacatggtggcacatgcctttagtcccagctactctggaggctgaagttggaggatggcttgagcccacgagatggaagttgcagtgaactgaaattgtgccactgcacttttcagcctgggtgccacagcgagaccctagttaagagaaaaaaaaagtaaaaacaaattgtgggtcaaagtaaatgtatacagttttattacaatgtaacaaaagttgaaaatcaggcagatgtgtattcagtatccaattcaatatatcttagaaaaagcacaggaaacagaccttaaaattgtaacctaccaactaacttacatgcttataaaagtaaaggagaataactggccgggcacggtggctcatgcctataaaattccagcactttgggaggccaaggcaggaggatcacttgagcctatgagttcaagaccagcctaggcaatgtagtgacacctcatttctatttattttaaaaaaaagagagagtaactacagaagaactttaaaaaataaaaaataagcttaccttggattcttggcttagagtagaggttttttttaagttatggaggaaacatttttgtaaaagtttaatgacccactttagatgctccaagaacaagcatcccttccatgtatgtcttgagaaagaaatcacagaagcatttctcaccaatactctttggcttaaaatgttcagcagaattgggcagtgggggtgacttttcttatattaataatatttacatccaatacactgaatcttcctttagaggtaagactttaatatctatactgtaaatatttggtttatttggcactactgtaagttttgtttttcacaaagctcttattatgaagcaaaataaaaattctagtttcttgtatgattttttgtactcattcattcctgttaagctgccaaaaattaaagtgcaatattgtatatttttaagaacaaatttaaaatagaattttgatgtttctcagatcacaagaaatacaaatctatatagtataataaaatcagcaaaaagatcaa

SEQ ID NO: 238 - DNA, 905 bp, Homo Sapiens
gtctactggttctgcaacaacctgattaaggagctgctgaaggagacgcggaaggagcacacgctgcgggcagtggagctgctctactccatcttctgcctggacatgcagcaagtgaccctggtcctgctgggccacatcctacctggcctgctcactgactcctccaagtggcacagcctcatggaccccccgggcactgctcttgccaagctggccgtgtggtgtgccctcagttcctactcctcccacaagggacaggcgtccacccgccagaagaagagacaccgcgaagacattgaggattatatcagcctcttccccctggacgatgtgcagccttcgaagttgatgcgactgctgagctctaatgaggacgatgccaacatcctttcgagccccaggtcttctctgggctctccatgtaccagttacctccgatgggtgaaggtcgggttggggcatccccggggagcaccacttttgcactcggcaggctgtttcccagcgctccatctgctccgtcccacagcagaccgatccatgagcagctccctctcagcctctcagctccacacggtcaacatgcgggaccctctgaaccgagtcctggccaacctgttcctgctcatctcctccatcctggggtctcgcaccgctggcccccacacccagttcgtgcagtggttcatggaggagtgtgtggactgcctggagcagggtggccgtggcagcgtcctgcagttcatgcccttcaccaccgtgtcggaactggtgaaggtgtcagccatgtccagccccaaggtggttctggccatcacggacctcagcctgcccctgggccgccaggtggctgctaaagccattgctgcactctgaggggcttggcatggccgcagtggggg

SEQ ID NO: 239 - DNA, 1969 bp, Homo Sapiens
actcttcctggagacaccgccatggccgggctatcccgcgggtccgcgcgcgcactgctcgccgccctgctggcgtcgacgctgttggcgctgctcgtgtcgcccgcgcggggtcgcggcggccgggaccacggggactgggacgaggcctcccggctgccgccgctaccaccccgcgaggacgcggcgcgcgtggcccgcttcgtgacgcacgtctccgactggggcgctctggccaccatctccacgctggaggcggtgcgcggccggcccttcgccgacgtcctctcgctcagcgacgggcccccgggcgcgggcagcggcgtgccctatttctacctgagcccgctgcagctctccgtgagcaacctgcaggagaatccatatgctacactgaccatgactttggcacagaccaacttctgcaagaaacatggatttgatccacaaagtcccctttgtgttcacataatgctgtcaggaactgtgaccaaggtgaatgaaacagaaatggatattgcaaagcattcgttattcattcgacaccctgagatgaaaacctggccttccagccataattggttctttgctaagttgaatataaccaatatctgggtcctggactactttggtggaccaaaaatcgtgacaccagaagaatattataatgtcacagttcagtgaagcagactgtggtgaatttagcaacacttatgaagtttcttaaagtggctcatacacacttaaaaggcttaatgtttctctggaaagcgtcccagaatattagccagttttctgtcacatgctggtttgtttgcttgcttgtttacttgcttgtttaccaatagagttgacctgttattggatttcctggaagatgtggtagctacttttttcctattttgaagccattttcgtagagaaatatccttcactataatcaaataagttttgtcccatcaattccaaagatgtttccagtggtgctcttgaagaggaatgagtaccagttttaaattgcccattggcatttgaaggtagttgagtatgtgttctttattcctagaagccactgtgcttggtagagtgcatcactcaccacagctgcctcctgagctgcctgagcctggtgcaaaaggattggcccccattatggtgcttctgaataaatcttgccaagatagacaaacaatgatgaaactcagatggagcttcctactcacgttgatttatgtctcacaatcctgggtattgttaattcaacatagggtgaaactatttctgataaagaacttttgaaaaactttttatactctaaagtgatactcagaacaaaagaaagtcataaaactcctgaatttaatttccccacctaagtcgaaacagtattatcaaaacacatgtgcacacagattattttttggctccaaaactggattgcaaaagaaagaggagaagaatattttgtgtgttcctggtattcttttataagtaaagtttacccaggcatggaccagcttcagccagggacaaaatcccctcccaaaccactctccacagctttttaaaaatacttctactcttaacaattacctaaggcttcctcaactgccccaaatctcttaatagcttctagtgctgctacaatctaagtcaggtcaccagagggaagagaacatggcattaaaagaatcacatcttcagaagagaagacactaatattattacccatatacatgatttcagaagatgacataagattcctcttaaagaggaaatgtcaggaatcaagccactgaatccttaaagagaaaagttgaatatgagtcattgtgtctgaaaactgcaaagtgaacttaactgagatccagcaaacaggttctgtttaagaaaaataatttatactaaatttagtaaaatggacttcttattcaaagcatcaataattaaaagaattattttaatgaaa

SEQ ID NO: 240 - DNA, 1177 bp, Homo Sapiens
agctcacggtcaagggcgggagcctgctgggaagcacggccgcgggggctcgctcggggccacctgcctggaactcagcgcgaggtccagagttccctccggctgcgcagcggcgcacgtgccccgtggaaggggcggttcccgcaccccagaaggagggggcgcccggccgcgcggactttcccttttgcttacttcctagtcccgggcaggccggctcggaggcagcgagaaagcgcagccaggcggctgctcggcgttctctcaggtgactgctcggagttctcccagtgtttggtgttgcaagcaggatccaaaggagacctatagtgactcccaggagctcttagtgaccaagtgaaggtacctgtggggctcattgtgcccattgctctttcactgctttcaactggtagttgtgggttgaagcactggacaatgccacatactttgtggatggtgtgggtcttgggggtcatcatcagcctctccaaggaagaatcctccaatcaggcttctctgtcttgtgaccgcaatggtatctgcaagggcagctcaggatctttaaactccattccctcagggctcacagaagctgtaaaaagccttgacctgtccaacaacaggatcacctacattagcaacagtgacctacagaggtgtgtgaacctccaggctctggtgctgacatccaatggaattaacacaatagaggaagattctttttcttccctgggcagtcttgaacatttagacttatcctataattacttatctaatttatcgtcttcctggttcaagcccctttcttctttaacattcttaaacttactgggaaatccttacaaaaccctaggggaaacatctcttttttctcatctcacaaaattgcaaatcctgagagtgggaaatatggacaccttcactaagattcaaagaaaagattttgctggacttaccttccttgaggaacttgagattgatgcttcagatctacagagctatgagccaaaaagtttgaagtcaattcagaatgtaagtcatctgatccttcatatgaagcagcatattttactgctggagatttttgtagatgttacaagttccgtggaatgtttggaactgcgagatactgatttggacactttccatttttcagaactatccactggtgaaa

SEQ ID NO: 241 - DNA, 4173 bp, Homo Sapiens
gagagcgagtttctgagcctctgagctctgcactggccgctgcagggagaacggactccgggcggagggcagccaatccgtttcagcgcaggtcttgctcgggttgggcttgccactgcctggaacatacctgtccccctggcgcaacactcagctggctgcgacggcaaccccgagcctggacactgcgccaggaatcctaaaaccaaaatattagaacgaaaacagaaacatggctcactatattacatttctctgcatggttttggtgctgcttcttcagaattctgtgttagctgaagatggggaagtaagatcaagttgtcgtactgctccgacagatttagttttcatcttagatggctcttatagtgttggcccagaaaactttgaaatagtgaaaaagtggcttgtcaatatcacaaaaaactttgacatagggccgaagtttattcaagttggagtggttcaatatagtgactaccctgtgctggagattcctctcggaagctatgattcaggagaacatttgacggcagcagtggaatccatactctacttaggaggaaacacaaagacagggaaggccatccagtttgcgctcgattacctttttgccaagtcctcacgatttctgactaagatagcagtggtacttacggatggcaaatcccaagatgacgtcaaggatgcagctcaagcagcaagagatagtaagataacattatttgctattggtgttggttcagaaacagaagatgccgaacttagagctattgccaacaagccttcgtctacttatgtgttttatgtggaagactatattgcaatatccaaaataagggaagtgatgaagcagaaactttgtgaagaatctgtctgtccaacacgaattccagtggcagctcgtgatgaaaggggatttgatattcttttaggtttagatgtaaataaaaaggttaagaaaagaatacagctttcaccaaaaaagataaaaggatatgaagtaacatcaaaagttgatttatcagaactcacaagcaatgttttcccagaaggtcttcctccatcatatgtatttgtgtctactcaaagatttaaagtcaagaaaatttgggatttatggagaatattaactattgatggaaggccacaaatagcagttaccttaaatggtgtggacaaaatcttattatttacaacaaccagcgtaattaatggctcacaagtggttacctttgctaaccctcaagttaagacgttgtttgatgaaggctggcaccaaattcgtctcttagtaacagaacaagatgtgactttgtatattgatgaccaacaaattgaaaacaagcccttacatccagttttagggatcttgatcaatgggcaaacccaaattggaaaatattctggaaaagaagaaactgttcagtttgatgtccaaaagttgcgaatctactgtgacccagaacagaacaaccgggagacagcatgtgagattcctggatttaatggagagtgccttaatggtcccagtgatgtaggttcaactccagctccctgtatttgtcctccgggaaaaccaggacttcaaggccccaaaggtgaccctggactgcctgggaaccctggctaccctggacaacctggtcaagatggtaagcctggatatcagggaattgcagggacaccaggtgttccaggatctccaggaatacaaggagctcgaggactaccaggttacaaaggagaaccagggcgagatggtgacaagggtgatcgtggacttcctggttttcctgggcttcatggcatgccaggatcaaagggtgaaatgggtgccaaaggagacaaaggatcacctggattttatggcaaaaagggtgcaaaaggtgaaaaggggaatgctggcttccctggcctccctggacctgctggagaaccaggaagacatggaaaggatggattaatgggtagtcccggtttcaagggagaagcaggatcccctggtgctccggggcaggatggaacacggggagagcctggaatcccaggatttcctggaaaccgaggattaatgggccaaaagggagaaattgggcctccaggacagcaaggaaaaaaaggagccccagggatgcctggtttaatgggaagcaatggctcaccaggccagcctggaacaccgggatctaagggaagcaaaggtgaacctggaattcaagggatgcctggggcttctgggctcaagggagaaccaggagcaacgggttccccaggagaaccaggatacatgggtttacccgggattcaaggaaaaaagggggacaaaggaaatcaaggtgaaaaaggtattcagggtcaaaagggagaaaatggaagacagggaattccagggcaacagggaattcaaggccatcatggtgcaaaaggagagagaggtgaaaagggagaacctggtgtccgaggtgccattggatcaaaaggagaatctggggtggatggcttgatggggcccgcaggtcctaaggggcaacctggggatccaggtcctcagggacccccaggtttggatgggaagcccggaagagagttttcagaacaatttattcgacaagtttgcacagatgtaataagagcccagctaccagtcttacttcagagtggaagaattagaaattgtgatcattgcctgtcccaacatggctccccgggtattcctgggccacctggtccgataggcccagagggtcccagaggattacctggtttgccaggaagagatggtgttcctggattagtgggtgtccctggacgtccaggtgtcagaggattaaaaggcctaccaggaagaaatggggaaaaagggagccaagggtttgggtatcctggagaacaaggtcctcctggtcccccaggtccagagggccctcctggaataagcaaagaaggtcctccaggagacccaggtctccctggcaaagatggagaccatggaaaacctggaatccaagggcaaccaggccccccaggcatctgcgacccatcactatgttttagtgtaattgccagaagagatccgttcagaaaaggaccaaactattagtgtctgatgcctcattcagcagcctaggcatggtgctttttctgtggtcttttgcatctcaggaagataaccaacagtaatcccttgaaaagaaacttaagtacctcggtgtttttattttttttttcttatggaaaaaaatataaaagatcacatatactgattttaaaggctcctcagtcatttggagcccttggattagcagcattaattaaatctcaagggtttcttgtaaagtccatttatgttaatcaaagttgaatataaaaatccaccattgcctgttagccagtcagttttagtcactgtgaaatatttcacattcagcctccatgcagtagagatttgagtttaatttcatgtccatgtgactttcatgtttcctatctcatagctcatgctactacataagccaaaacatgtatctcatcattggaagtaagatcagggctgatattcacctgggatagacagtattggtgaactactcatttactacagtgtctcagccttgataaggggcagtggattgcctgttgttcggtgttgtgaatagcacctctgaataagattagagtgtttcttaattcatttcaaactctaaaattagattaatggtggtgctaagaaagagtattaattactttgggaatggtcaaaattaacattaaaaacattttagacaaaaagtttcattgtacattcaaagaaaatgtaagtttggaagtactaaaagactattttatacttgttgattaatcggaatgtttgttgtatgccttcattttccatttcacttatatgtgtatgtccatatatgttaattttcattgtagcaaagctaatggaaataaagctaatgctctagttgaaagaaaaggaaaactcctgaaatcctagaatgtcttgttatttttagctgactgtaaaatattatgaacagtctttgtgtattgtgcttaatgcttttgtaagaaacagaatttgaaatatttcatccttgtcatgctcaaaattttgttacatgcttgttattcagagtataataaagttttgtacaggcctga

SEQ ID NO: 242 - DNA, 832 bp, Homo Sapiens
tggcagagctcgccactccttagtcgaggcaagacgtgcgcccgagccccgccgaaccgaggccacccggagccgtgcccagtccacgccggccgtgcccggcggccttaagaacccggcaacctctgccttcttccctcttccactcggagtcgcgctccgcgcgccctcactgcagcccctgcgtcgccgggaccctcgcgcgcgaccgccgaatcgctcctgcagcagagccaacatgcccatcactcggatgcgcatgagaccctggctagagatgcagattaattccaaccaaatcccggggctcatctggattaataaagaggagatgatcttccagatcccatggaagcatgctgccaagcatggctgggacatcaacaaggatgcctgtttgttccggagctgggccattcacacaggccgatacaaagcaggggaaaaggagccagatcccaagacgtggaaggccaactttcgctgtgccatgaactccctgccagatatcgaggaggtgaaagaccagagcaggaacaagggcagctcagctgtgcgagtgtaccggatgcttccacctctcaccaagaaccagagaaaagaaagaaagtcgaagtccagccgagatgctaagagcaaggccaagaggaagtcatgtggggattccagccctgataccttctctgatggactcagcagctccactctgcctgatgaccacagcagctacacagttccaggctacatgcaggacttggaggtggagcaggccctgactccagctacaacagatgaggatgaggaagggaaattacctgaggacatcatgaag

SEQ ID NO: 243 - DNA, 1961 bp, Homo Sapiens
gggagaggcttctgggtcaaaggaccagtctgcagagggatcctgtggctggaagcgaggaggctccacacggccgttgcagctaccgcagccaggatctgggcatccaggcacggccatgacccctccgaggctcttctgggtgtggctgctggttgcaggaacccaaggcgtgaacgatggtgacatgcggctggccgatgggggcgccaccaaccagggccgcgtggagatcttctacagaggccagtggggcactgtgtgtgacaacctgtgggacctgactgatgccagcgtcgtctgccgggccctgggcttcgagaacgccacccaggctctgggcagagctgccttcgggcaaggatcaggccccatcatgctggatgaggtccagtgcacgggaaccgaggcctcactggccgactgcaagtccctgggctggctgaagagcaactgcaggcacgagagagacgctggtgtggtctgcaccaatggtacttctactcccgaaggattgacatcaccctgtcgtcagtcaagtgcttccacaagctggcctctgcctatggggccaggcagctgcagggctactgcgcaagcctctttgccatcctcctcccccaggacccctcgttccagatgcccctggacctgtatgcctatgcagtggccacaggggacgccctgctggagaagctctgcctacagttcctggcctggaacttcgaggccttgacgcaggccgaggcctggcccagtgtccccacagacctgctccaactgctgctgcccaggagcgacctggcggtgcccagcgagctggccctactgaaggccgtggacacctggagctggggggagcgtgcctcccatgaggaggtggagggcttggtggagaagatccgcttccccatgatgctccctgaggagctctttgagctgcagttcaacctgtccctgtactggagccacgaggccctgttccagaagaagactctgcaggccctggaattccacactgtgcccttccagttgctggcccggtacaaaggcctgaacctcaccgaggatacctacaagccccggatttacacctcgcccacctggagtgcctttgtgacagacagttcctggagtgcacggaagtcacaactggtctatcagtccagacgggggcctttggtcaaatattcttctgattacttccaagccccctctgactacagatactacccctaccagtccttccagactccacaacaccccagcttcctcttccaggacaagagggtgtcctggtccctggtctacctccccaccatccagagctgctggaactacggcttctcctgctcctcggacgagctccctgtcctgggcctcaccaagtctggcggctcagatcgcaccattgcctacgaaaacaaagccctgatgctctgcgaagggctcttcgtggcagacgtcaccgatttcgagggctggaaggctgcgattcccagtgccctggacaccaacagctcgaagagcacctcctccttcccctgcccggcagggcacttcaacggcttccgcacggtcatccgccccttctacctgaccaactcctcaggtgtggactagacggcgtggcccaagggtggtgagaaccggagaaccccaggacgccctcactgcaggctcccctcctcggcttccttcctctctgcaatgaccttcaacaaccggccaccagatgtcgccctactcacctgagcgctcagcttcaagaaattactggaaggcttccactagggtccaccaggagttctcccaccacctcaccagtttccaggtggtaagcaccaggacgccctcgaggttgctctgggatccccccacagcccctggtcagtctgcccttgtcactggtctgaggtcattaaaattacattgaggttcctacatttgtttgtacagaa

SEQ ID NO: 244 - DNA, 1555 bp, Homo Sapiens
agtggtgtttgctttctccaccagaagggcacactttcatctaatttggggtatcactgagctgaagacaaagagaagggggagaaaacctagcagaccaccatgtgctatgggaagtgtgcacgatgcatcggacattctctggtggggctcgccctcctgtgcatcgcggctaatattttgctttactttcccaatggggaaacaaagtatgcctccgaaaaccacctcagccgcttcgtgtggttcttttctggcatcgtaggaggtggcctgctgatgctcctgccagcatttgtcttcattgggctggaacaggatgactgctgtggctgctgtggccatgaaaactgtggcaaacgatgtgcgatgctttcttctgtattggctgctctcattggaattgcaggatctggctactgtgtcattgtggcagcccttggcttagcagaaggaccactatgtcttgattccctcggccagtggaactacacctttgccagcactgagggccagtaccttctggatacctccacatggtccgagtgcactgaacccaagcacattgtggaatggaatgtatctctgttttctatcctcttggctcttggtggaattgaattcatcttgtgtcttattcaagtaataaatggagtgcttggaggcatatgtggcttttgctgctctcaccaacagcaatatgactgctaaaagaaccaacccaggacagagccacaatcttcctctatttcattgtaatttatatatttcacttgtattcatttgtaaaactttgtattagtgtaacatactccccacagtctacttttacaaacgcctgtaaagactggcatcttcacaggatgtcagtgtttaaatttagtaaacttcttttttgtttgtttatttgtttttgtttttttttaaggaatgaggaaacaaaccaccctctgggggtaatttacagactgagtgacagtactcagtatatctgagataaactctataatgttttggataaaaataacattccaatcactattgtatatatgtgcatgtattttttaaattaaagatgtctagttgctttttataagaccaagaaggagaaaatccgacaacctggaaagatttttgttttcactgcttgtatgatgtttcccattcatacacctataaatctctaacaagaggccctttgaactgccttgtgttctgtgagaaacaaatatttacttagagtggaaggactgattgagaatgttccaatccaaatgaatgcatcacaacttacaatgctgctcattgttgtgagtactatgagattcaaatttttctaacatatggaaagccttttgtcctccaaagatgagtactagggatcatgtgtttaaaaaaagaaaggctacgatgactgggcaagaagaaagatgggaaactgaataaagcagttgatcagcatcattggaacatggggacgagtgacggcaggaggaccacgaggaaataccctcaaaactaacttgtttacaacaaaataaagtattcactacca

SEQ ID NO: 245 - DNA, 2591 bp, Homo Sapiens
gatttctgctctctgcgctgagcacagcggcaccaggctgagctaagcagggccgccttgggcaggcctacgtggtggtgcaggcgagacccaggctgggcaaggcgcagtttcagtttccatcttgggtctctgagctgagcagagtggcaccaggctgagttaagtgggactgccctgggcagacctacctactagagcagaatggagcttcggtcctaccaatgggaggtgatcatgcctgccctggagggcaagaatatcatcatctggctgcccacgggtgccgggaagacccgggcggctgcttatgtggccaagcggcacctagagactgtggatggagccaaggtggttgtattggtcaacagggtgcacctggtgacccagcatggtgaagagttcaggcgcatgctggatggacgctggaccgtgacaaccctgagtggggacatgggaccacgtgctggctttggccacctggcccggtgccatgacctgctcatctgcacagcagagcttctgcagatggcactgaccagccccgaggaggaggagcacgtggagctcactgtcttctccctgatcgtggtggatgagtgccaccacacgcacaaggacaccgtctacaacgtcatcatgagccagtacctagaacttaaactccagagggcacagccgctaccccaggtgctgggtctcacagcctccccaggcactggcggggcctccaaactcgatggggccatcaaccacgtcctgcagctctgtgccaacttggacacgtggtgcatcatgtcaccccagaactgctgcccccagctgcaggagcacagccaacagccttgcaaacagtacaacctctgccacaggcgcagccaggatccgtttggggacttgctgaagaagctcatggaccaaatccatgaccacctggagatgcctgagttgagccggaaatttgggacgcaaatgtatgagcagcaggtggtgaagctgagtgaggctgcggctttggctgggcttcaggagcaacgggtgtatgcgcttcacctgaggcgctacaatgacgcgctgctcatccatgacaccgtccgcgccgtggatgccttggctgcgctgcaggatttctatcacagggagcacgtcactaaaacccagatcctgtgtgccgagcgccggctgctggccctgttcgatgaccgcaagaatgagctggcccacttggcaactcatggcccagagaatccaaaactggagatgctggaaaagatcctgcaaaggcagttcagtagctctaacagccctcggggtatcatcttcacccgcacccgccaaagcgcacactccctcctgctctggctccagcagcagcagggcctgcagactgtggacatccgggcccagctactgattggggctgggaacagcagccagagcacccacatgacccagagggaccagcaagaagtgatccagaagttccaagatggaaccctgaaccttctggtggccacgagtgtggcggaggaggggctggacatcccacattgcaatgtggtggtgcgttatgggctcttgaccaatgaaatctccatggtccaggccaggggccgtgcccgggccgatcagagtgtatacgcgtttgtagcaactgaaggtagccgggagctgaagcgggagctgatcaacgaggcgctggagacgctgatggagcaggcagtggctgctgtgcagaaaatggaccaggccgagtaccaggccaagatccgggatctgcagcaggcagccttgaccaagcgggcggcccaggcagcccagcgggagaaccagcggcagcagttcccagtggagcacgtgcagctactctgcatcaactgcatggtggctgtgggccatggcagcgacctgcggaaggtggagggcacccaccatgtcaatgtgaaccccaacttctcgaactactataatgtctccagggatcctgtggtcatcaacaaagtcttcaaggactggaagcctgggggtgtcatcagctgcaggaactgtggggaggtctggggtctgcagatgatctacaagtcagtgaagctgccagtgctcaaagtccgcagcatgctgctggagacccctcaggggcggatccaggccaaaaagtggtcccgcgtgcccttctccgtgcctgactttgacttcctgcagcattgtgccgagaacttgtcggacctctccctggactgaccacctcattgctgcagtgcccggtttgggctgtagggggcgggagagtctgcagcagactccaggcccctccttcctgaatcatcagctgtgggcatcaggcccaccagccacacaggagtcctgggcaccctggcttaggctcccgcaatgggaaaacaaccggagggccagagcttagtccagacctaccttgtacgcacatagacattttcatatgcactggatggagttagggaaactgaggcaaaagaatttgccatactgtactcagaatcacgacattccttccctaccaaggccacttctattttttgaggctcctcataaaaataaatgaaaaaatggga

SEQ ID NO: 246 - DNA, 1820 bp, Homo Sapiens
agacgcctgcagaccatcccagacgccggagcccgagccccgacgagtccccgcgcctcatccgcccgcgtccggtccgcgttcctccgccccaccatggctcggggccccggcctcgcgccgccaccgctgcggctgccgctgctgctgctggtgctggcggcggtgaccggccacacggccgcgcaggacaactgcacgtgtcccaccaacaagatgaccgtgtgcagccccgacggccccggcggccgctgccagtgccgcgcgctgggctcgggcatggcggtcgactgctccacgctgacctccaagtgtctgctgctcaaggcgcgcatgagcgcccccaagaacgcccgcacgctggtgcggccgagtgagcacgcgctcgtggacaacgatggcctctacgaccccgactgcgaccccgagggccgcttcaaggcgcgccagtgcaaccagacgtcggtgtgctggtgcgtgaactcggtgggcgtgcgccgcacggacaagggcgacctgagcctacgctgcgatgagctggtgcgcacccaccacatcctcattgacctgcgccaccgccccaccgccggcgccttcaaccactcagacctggacgccgagctgaggcggctcttccgcgagcgctatcggctgcaccccaagttcgtggcggccgtgcactacgagcagcccaccatccagatcgagctgcggcagaacacgtctcagaaggccgccggtgacgtggatatcggcgatgccgcctactacttcgagagggacatcaagggcgagtctctattccagggccgcggcggcctggacttgcgcgtgcgcggagaacccctgcaggtggagcgcacgctcatctattacctggacgagattcccccgaagttctccatgaagcgcctcaccgccggcctcatcgccgtcatcgtggtggtcgtggtggccctcgtcgccggcatggccgtcctggtgatcaccaaccggagaaagtcggggaagtacaagaaggtggagatcaaggaactgggggagttgagaaaggaaccgagcttgtaggtacccggcggggcaggggatggggtggggtaccggatttcggtatcgtcccagacccaagtgagtcacgcttcctgattcctcggcgcaaaggagacgtttatcctttcaaattcctgccttccccctcccttttgcgcacacaccaggtttaatagatcctggcctcagggtctcctttctttctcacttctgtcttgaaggaagcatttctaaaatgtatcccctttcggtccaacaacaggaaacctgactggggcagtgaaggaagggatggcatagcgttatgtgtaaaaaacaagtatctgtatgacaacccgggatcgtttgcaagtaactgaatccattgcgacattgtgaaggcttaaatgagtttagatgggaaatagcgttgttatcgccttgggtttaaattatttgatgagttccacttgtatcatggcctacccgaggagaagaggagtttgttaactgggcctatgtagtagcctcatttaccatcgtttgtattactgaccacatatgcttgtcactgggaaagaagcctgtttcagctgcctgaacgcagtttggatgtctttgaggacagacattgcccggaaactcagtctatttattcttcagcttgcccttactgccactgatattggtaatgttcttttttgtaaaatgtttgtacatatgttgtctttgataatgttgctgtaattttttaaaataaaacacgaatttaataaaatatgggaaaggca

SEQ ID NO: 247 - DNA, 1427 bp, Homo Sapiens
agatcgctccgcccccatccgcaggttctaactttggcctgggactctgcccctctacctcagcacagaatcgccccgggtcctactacagaatcaatccttgaacactgcctccacgtcgccggctcaatctgggcgagaacccagacttccaccgcagccccgcaatctgcagacctcagcggcagcgcaggtggcagacctgcctcctttgcctgtgagtcatggcagctcccatgaatggccaagtgtgtgtggtgactggtgcctccaggggtattggccgtggcattgccttgcagctctgcaaagcaggcgccacagtttacatcactggccgccatctggacacccttcgcgttgttgctcaggaggcacaatccctcgggggccaatgtgtgcctgtggtgtgcgattcaagccaggagagtgaagtgcgaagcctgtttgagcaagtggatcgggaacagcaagggcgtctagatgtgctggtcaacaatgcttatgcaggggtccagacgatcctgaacaccaggaataaggcattctgggaaacccctgcctccatgtgggatgatatcaacaacgtcggactcagaggccactacttttgctcagtgtatggggcacggctgatggtaccagctggccaggggctcatcgtggtcatctcctccccaggaagcctgcagtatatgttcaatgtcccctatggtgtgggcaaagctgcgtgtgacaagctggctgctgactgtgcccacgagctgcggcgccatggggtcagctgtgtgtctctgtggccggggattgtgcagacagaactgctgaaggagcatatggcaaaggaggaggtcctgcaggatcctgtgttgaagcagttcaaatcagccttctcatctgcggaaaccacagaattgagtggcaaatgtgtggtggctttggcaacagatcccaatatcctgagcctgagtggtaaggtgctgccatcctgtgaccttgctcgacgctatggccttcgggatgtggacggccgccccgtccaagactatttgtctttgagctctgttctctcacacgtgtccggcctgggctggctggcctcctacctgccctccttcctccgtgtgcccaagtggattattgccctctacactagcaagttctaaccctcctggtctgacactacgtctctgcttgtcttctcatttggacttggtggttcgtcctgtctcagtgaaacagcagcctttcttgtttacccatacccttgatatgaagagaagccctctgctgtgtgtccgtggtgagttctggggtgcgcctaggtcccttctttgtgccttggttttccttgtccttctttttactttttgccttagtattgaaaaatgctcttggagctaataaaagtctcatttctctttcaa

SEQ ID NO: 248 - DNA, 1583 bp, Homo Sapiens
gcagtagctgagcagtggcagcagagaggcagacgtgagctgagggcgcagaggcaggcagcatctctgagggtccccaaggaacatggctgggagccgtgaggtggtggccatggactgcgagatggtggggctggggccccaccgggagagtggcctggctcgttgcagcctcgtgaacgtccacggtgctgtgctgtacgacaagttcatccggcctgagggagagatcaccgattacagaacccgggtcagcggggtcacccctcagcacatggtgggggccacaccatttgccgtggccaggctagagatcctgcagctcctgaaaggcaagctggtggtgggtcatgacctgaagcacgacttccaggcactgaaagaggacatgagcggctacacaatctacgacacgtccactgacaggctgttgtggcgtgaggccaagctggaccactgcaggcgtgtctccctgcgggtgctgagtgagcgcctcctacacaagagcatccagaacagcctgcttggacacagctcggtggaagatgcgagggcaacgatggagctctatcaaatctcccagagaatccgagcccgccgagggctgccccgcctggctgtgtcagactgaagccccatccagcccgttccgcagggactagaggctttcggctttttgggacagcaactaccttgcttttggaaaatacatttttaatagtaaagtggctctatattttctctacgccatcactgggtcctcttcttattcttctctccaagctgggttaacagtagacaggacccatttctgtgtgatgttaggagggaatgaagtcttatgctggggaggtgggcaagtatcaatttccttaatatcttgaatcctgtgggtccaaaatgtggcttggaaatctaagtagcatgtggcttaattactaatcccaccctttgctgttgcatcccagccctattcctggtgcatttatgcccagagaggtggcattatttcctggggtggcattcagctcctcttgagttggtgccacagcatttgtgggctttgaagcaaaggtacaggaaatgtcaagggtgccaccccggcaaccttgagcaagtcacccctcctatttgtaaaatgaggaaggaaaggtaacaaactgtggagtcagagagaagtaggttggaatcctctttgtcatttagtagctgtttgacctaaggtggtttactgaacttctcagtttctccatctgtaaaatgagaattctagcaactcgtagggtatttgtgagatgttgcaggcaaagcccccagcaccatgcctgtcctagcttaagcacccaccaggtgtcgataagtaattgttcttccctggactgcctgcacatctagggcaccccaggaagagtcaccgcactctgtttcggggctcggctctctgaggggagggcatcctgtatggggaggagggtctggaccagagctgtccctgatcgctagaatcaacggcagaattcttgttattttaataataattaataatttagtgcttccactaaataaaaatcattggaatggtg

SEQ ID NO: 249 - DNA, 2030 bp, Homo Sapiens
acttttggtcgagcggagggcgcgcagctccaccgttgccaagacgccgcgtaaacacccgagcgcgcgcagccaggtgcgctccttggggctgctggctgctgcgtttgcggcgggaggtggtggccgcggtcccacgagagggggtatttttcgtcagccaagatgggttccaaaaggagaaatttgagctgtagtgaaaggcatcagaaattagtagatgaaaactactgcaaaaaattacatgtccaagctctaaaaaacgtcaacagtcaaatcaggaatcaaatggtgcagaatgaaaatgataaccgtgttcagcgcaagcaatttctcagattattacaaaatgaacaatttgagttggatatggaagaggccattcaaaaggcagaagaaaacaagagattgaaagaactccagctcaaacaagaagaaaaactggctatggaattggcaaaactgaaacatgaaagtctaaaggacgaaaagatgaggcaacaagtaagagaaaacagcattgagcttagagaattggagaagaaattaaaagcagcttacatgaataaagaaagggcagctcagattgctgaaaaggatgccattaaatatgaacaaatgaaacgtgatgctgaaatagccaaaaccatgatggaagaacacaagagaataataaaggaagagaatgctgcagaagacaaacgaaacaaagcgaaagcacagtactatcttgacttagagaaacaacttgaagaacaagaaaaaaaaaagcaggaagcttatgagcagctgctaaaagagaaactcatgattgatgaaattgttaggaagatctatgaagaagatcagttggaaaaacaacaaaagttagaaaaaatgaatgcaatgcgaaggtatatagaagagtttcagaaagagcaggctctctggagaaaaaagaaacgtgaggagatggaagaagaaaacagaaaaatcatagagtttgctaacatgcagcagcaaagagaagaagatcggatggcaaaagttcaagaaaatgaggagaaaaggctacagcttcagaatgcgttgacacagaaattagaagaaatgctgcggcaacgtgaagatttggaacaagtgcgacaagaattataccaggaagaacaagctgaaatatataagagcaagctaaaagaagaagcagaaaagaaattgagaaagcaaaaagagatgaagcaagattttgaagaacaaatggccttgaaggaattagtgctacaggctgcaaaagaggaagaggagaactttagaaaaactatgctagctaaatttgctgaggatgatcgaatagaattaatgaatgctcagaaacaaagaatgaagcagctggaacacaggagggctgtggaaaaacttattgaagagcgtcgccaacaattccttgcagacaaacaacgtgaactagaagagtggcagttgcagcaaaggcggcaaggatttattaatgcaattattgaagaagaaaggctaaaacttcttaaagagcatgctacaaacttactaggctatctccctaaaggagtatttaaaaaagaggatgatattgatctgcttggtgaagagttcaggaaagtatatcaacaaaggagtgaaatttgtgaagagaaatgatatcatcaaaattgggtaaagcatagattttttgcatgttaccactagatgtcagcataacttttgttttacagttcagtggcattaggtatccattgtctgtttggattttgtaaatcatcactgaatttcataacttgtaaacaattatcagatacaaattaattttaatcaagctgttatttttgtactgataatttcaaaatccgatttctacaacactacagagcactgtttgcatccccatcctcaagacagtatatttaccttgactaatacagaactctaccccaaagtgaactgccttctgtctgtgtttacgaactttacttacttgatttagccagggaaataaatatttggaattttcttttaaa

SEQ ID NO: 250 - DNA, 748 bp, Homo Sapiens
ggcaggagtggcgctgctcacctctggtgccaaagggcggcgcagcggctgccgagctcggccctggaggcggcgagaacatggtgcgcaggttcttggtgaccctccggattcggcgcgcgtgcggcccgccgcgagtgagggttttcgtggttcacatcccgcggctcacgggggagtgggcagcgccaggggcgcccgccgctgtggccctcgtgctgatgctactgaggagccagcgtctagggcagcagccgcttcctagaagaccaggtcatgatgatgggcagcgcccgagtggcggagctgctgctgctccacggcgcggagcccaactgcgccgaccccgccactctcacccgacccgtgcacgacgctgcccgggagggcttcctggacacgctggtggtgctgcaccgggccggggcgcggctggacgtgcgcgatgcctggggccgtctgcccgtggacctggctgaggagctgggccatcgcgatgtcgcacgacatccccgattgaaagaaccagagaggctctgagaaacctcgggaaacttagatcatcagtcaccgaaggtcctacagggccacaactgcccccgccacaacccaccccgctttcgtagttttcatttagaaaatagagcttttaaaaatgtcctgccttttaacgtagatatatgccttcccccactaccgtaaatgtccatttatatcattttttatatattcttataaaaatgtaaaa

SEQ ID NO: 251 - DNA, 1736 bp, Homo Sapiens
gcactctcgggatggagggcgagcgccgggcatcgcaggcgccctcctcgggcctcccggccgggggcgccaacggggagagcccggggggcggcgccccctttccgggcagcagtggctcttccgccctgctgcaggcggaggtgctggatctggacgaggacgaggacgacctggaggtgttcagcaaggatgcctcattgatggacatgaactccttcagccctatgatgccaacatcccctttatcaatgataaaccaaatcaagtttgaggatgaaccagatttaaaggatctcttcatcacagttgatgaacctgaaagtcatgttactacaatagaaactttcattacgtataggattattactaagacatctcgtggggaatttgactccagtgaatttgaagttaggagacgatatcaagatttcctttggttgaagggaaaactggaagaagcacaccccactctgattattccaccattgccagaaaagtttatagtaaaaggaatggtggaacgctttaacgatgacttcattgagacacgcaggaaggctttacataaatttttgaaccgaattgctgatcatccaactttaacatttaatgaagacttcaaaatttttctcactgcacaagcttgggaactctcttctcacaagaagcaaggtcctggcttgctaagcaggatggggcaaaccgtcagagctgttgcgtcctcaatgagaggagttaaaaaccgcccagaggagttcatggaaatgaataactttattgaactatttagccagaaaataaatttgatagataaaatatctcagagaatttataaggaagaaagggaatattttgatgaaatgaaagaatatggcccaattcatattctgtggtcagcgtcagaagaggatctggttgatactctaaaggatgttgccagctgcattgacagatgctgtaaggccactgaaaagcggatgtctggactctcagaggccctgcttcctgttgtacatgagtacgtgctttatagtgaaatgttaatgggtgttatgaaaagaagagaccaaatacaagcagaactggattccaaagttgaagttttgacctataaaaaggcagatactgatctgcttccagaggagattggaaaacttgaagataaagtggaatgtgctaataatgccctgaaagcagattgggagagatggaaacaaaatatgcaaaatgatatcaagttagcatttacagatatggctgaggagaatatccattattatgaacagtgccttgctacgtgggagtcattccttacatcacagaccaaccttcacttggaagaagcctctgaagataaaccttaatcccattgaggacttctgtttgatctttgggagacagcatttattaaccaaagttattctttctggatctgccgtgtccttataaagtggatgaaaaatgttttgtacccatctggaaaaccaacaacttgaaatctcaggtattccaggtcactgacatgaatttgaagatatatctatctgtatggatatatatctatatgtatatagatatataaatacagagagatatctggcttggttttaattatgttcttaaatttgtgtgccaataattgcatatagattttttttcttaaatatttgactgtggaacatgccattttaaatatgttgtaaggactgttttaataaaaagtttagtatgaa

SEQ ID NO: 252 - DNA, 600 bp, Homo Sapiens
acctgcattgctctacaatctgtggcctcagcccttgccaactctgcctcttcccccgctgactggggtatcagtttatggtgccctgcaggaagaccctcttgttcctgtgggtgggaagcctctgcagagatgtgggcagctggtcaggatggccattcgggctcagcacagcaacgcagcccagactcagactggggaagcaaacaggggctggacaggccaggagagcctgtcggacagtgatcctgagatgtgggagttgctgcagagggagaaggacaggcagtgtcgtggcctggagctcattgcctcagagaacttctgcagccgagctgcgctggaggccctggggtcctgtctgaacaacaagtactcggagggttatcctggcaagagatactatgggggagcagaggtggtggatgaaattgagctgctgtgccagcgccgggccttggaagcctttgacctggatcctgcacagtggggagtcaatgtccagccctactccgggtccccagccaacctggccgtctacacagcccttctgcaacctcacgaccggatcatggggctggacctgcccgatgggggcca

SEQ ID NO: 253 - DNA, 3344 bp, Homo Sapiens
agactcggtaagccccggccgcgcagggcgccgcgcgcagtccagccggcccggccctgccctgccctgccctgtcctgccctgccctgccctgccctgccctgcactgcccggcccggcacgggcggcgcgatgtgaggcgtccgagcccggagcctccgcctggcatcagctccacgtagcccagcgccggcacgcgcgaggccccccttctgcagaggccgggctggaggagaagatggcggccaagcagcccccgcctctgatgaagaagcacagccagacggacctcgtgagccgcctgaagacccgcaagatcctcggcgtgggcggggaggatgacgacggggaggtgcatcgctccaagatcagccaggtcttaggcaatgaaatcaagtttaccattcgggagcctttggggctcagggtctggcagttcgtctctgctgtgctcttctccggcattgccatcatggcgcttgccttccctgaccagctctatgatgcggtctttgatggagcccaggtgaccagcaagacccccatccgcctctacggcggtgccctcctcagcatctccctgatcatgtggaacgctctctacacggctgagaaggtcatcattcgatggaccctgctcaccgaagcttgctatttcggggtccagttcttggtggtcactgccacgctagctgagacgggcctcatgtccctggggatcctgctgctcctggtcagccgcctcctttttgtcgtcatcagcatttactactattaccaagtcggccgaagacccaagaaggcctagttgcccgctgggcctggggccctgcccatgcctgggccagagtggcgctggggcctcggcttccctttggctcctggaaggcaggagggtcccctgccctgccccagtcctgccccagggaggcagggggtggggggccttcctttcctcctgggcaccccgtgtgctgtgatctcctgggctttcaggcttgacatgctggtctggggagagacagggcctctgctgccctgttcttcaccctcacagtgatacctcctttccttgggtctcttggcctccagaccccctcaatagacactgactaaagtcaggctggagtcatgagggtagtgggctaagtcgagggtccagcctcttctgccaggaagcccttcttgcttttgagagaggctgtgaccaccccccatccttctccctacactcccagccaacctagtgcccaagcagctaaacttggcttccttctaatcctggaaaaccctgtacccctcctcctcaatctggccctctccacatgcacaccctgaaaacacacacagacacacaacacacacacatacacacccctgaacacacacacagacacacatacacccatgatgtgagcaaacacacacacgtgcgccttcatagcccagccaagggcatgcaggcagggtgtgctgcctgagatggcacctccctttcagccattcttcaagaatgggccacacacagctagaagtcctctcccagctagaagtcctgtccccactctcctggcctgacaagatgagctctcctgggaccttgctctagggcactctgcctctaccctaggacactggaatgccctgggagccccctccctgcaaccagcctgagttcagccccacggacaaagggacacacagcccccaatggagaccattgtaagtggtggggctgggagaggaggaacagaaggaaagccatagcgctctcttgccccttggcatgtaccccaaggcctgatggccactgggctcagcctgtcccccactcctgcctgcttcccggtgagctgccccccacacgtgcagcccgggctgcctccagggtctggctgagtgggatcaggtggccctccaactcagcacaggaaataagtagaaacatttcagcaggccacctcccctcatcttccccgccctgtccagcgccctggcaaaggctgacaactggctgtcttggggccgaacagcccctgccctgcctctgagggcccaccagcctgtgctgcatacccaccgcccagcttctccctgagggcccaccagcctgtgctgcatacccaccgcccagcttctccctgagggcccaccagcctgtgctgtacaccccgttagtccctgatcccaaccttctccctcctgccagcacaccgatgcacacaccggaagtggcgagcccaagccctggggacaggtgtagggagaaaagcagccccaggcctcagactcgcttcccatcctggcatagagtgggggatggctggagggtgtctataggtacagcccgctctggctgctgccaggtgggcccctgccaggggtcctcacccctgtccaccctgtgcctggctgtccctgcacccagatacagcaacatggcctgtacccagcagagtggtggcaccaccatggttacagcggatgccccgagactctgcttggtaaacgtggcagagcagaatgggaggctggaccctgaggaagggcccctctcctggcatctgtctcttgctacctaagcctgtgcctctccctaaagagctgcctccctgctgccgagccctggtctggccacgagccaccactgcctcccgctgctgcccacaggtggtgccgccaatgggcagtgccctcaggccgaagcctcaatcccccatctgagccaggcctaatcctctaatagtgatggttggtttgtcctcccataactgcaggtggattccacctggggaatgaggctgcgtgtcgggcgtctgctggccctgagacatccagtcttccacactcaactgtgggatgggagggtggcgtggccttaccccatgaggctgtccaggctctggcacacagctgtgctcacaaaatactgggtggcttggttagagctaattgtagtggagcctgcaggtgagggtgagggagggggctgcaggtcaggtaagatctggaagacagacgtacagcttggagggcagggggactctaaggcaaggagatttacagttgggaaggaggcagtggcagaggggtgagggacaggggcccttaagtccagcgaggaaagctcggtgtgggcccgctctacgctccgtttggggtgacctggaacgcctcttctcccagctccctccagccatcagcagcctcttgtcaagcttctgcctcgccccagtctatccccaaccccaaatcaagaccacctttcttcacggtcactatttattctttgttcctttttctttttgtaagaaacattcacaaaaaccagtgcaaaaccatca

SEQ ID NO: 254 - DNA, 2206 bp, Homo Sapiens
gccggacgctcgggctcctcggcgctcgcgcctcccctccctcctcccggctgtctcccggagcgccccaccctccgccctgcgctcgcctcgcgcgcaggcaccggccggcgggcgcggggagcggggcgcggcggcgctcgcctctgcggagccgccccctggccgctgccgccgcgcaccgcccagcccgcgccgcccgcgccgcccgggctccagccgccccgctgtccgccctgagtgcgccgcggctgcccgagcgccccgcagacgggcgggtggccgtggacgcccagccagcagcccgcagcatggattcggattccggggagcagagcgagggcgagcccgtgaccgccgcaggtcctgatgtttttagttcaaagagtcttgcgcttcaagcccagaagaagattctgagcaaaatagccagcaaaactgtggccaacatgttgattgatgacaccagcagcgagatctttgatgagctctacaaagtcaccaaagagcacacacacaacaagaaggaagcccacaagatcatgaaagacttaatcaaggtggcgatcaaaatcgggatcctctaccggaacaaccagtttagccaagaggagctggttattgtggagaagttccggaagaagctgaaccagaccgccatgaccattgtcagcttctatgaggtggaatacaccttcgataggaacgtgctctccaatctcctgcatgagtgcaaggacctggtgcatgaactggtgcagcggcacctgacgcccaggacccacgggcgcatcaaccacgtctttaaccactttgccgatgtggagttcctctccaccctctatagtctggatggagactgtaggcccaacctcaagaggatttgtgaaggaatcaataagttgctagatgagaaagtcctttaaatgccttccctcctactggactttgctgctttaaagttacagcactcaaccatgatctgggtgagaatcaagaacataagcagaaacccttgtcaaagatgtccatgttctttcctgttcatccctctgatgctgattctgatgctgaactgagctcaggtgtgtttttcttccaagctttctagcaaggtttctacttaaaatcacctgtgtgcaagcccaaaggacatttcatctattctaagcagaaaggctgttttgttcattacagtgagtgctgttcatctcatggagtgggaggagcactaaaccaggagacagaggacatggatttggtttccagcttaaccagttaggactctgtcctctgcattctggaaccatgatgcctgcctgcctgcctcacagggctgttgtgaggaccagatgagatgatgtatgttcatacttttggaatctctaatttaaagtcttaatattttgtcttctgagtgtgaggggataaacctggatgtagactattaagcagcataggagaaaagaacaatagaatctaatggactgggtttgcaatctctctctaaatgcactgcttcagacaaagtgaaatccaaaggtgtgaaaaagtatagctgcaaattggaaaaatgtgtttcaagagtcgtctttttggccaggcatggtggctcacacctgtaatcccagcactttgggaggccgaggtgggcagattgcctgaggtccggagttcaagatcagcctggccaacatgatgaaaccctatctctactaaaattacaaaaattagccaggcgtggtggtacacgcctgtaatcccagctactcaggaggctgaggcaggagaattgtttgaacctgggagatggaggctgcagtgagctgagatcacgccactgtactccagcctgggcaacagagcaagactctgtctctaaaaaataataataataataataatttttttaaaaagaggtgtttttgaggtcttagatgttcaggttgatgatcctgcagagggaaactttccatgggggggtggggagagagagttttccatccacaatatagaaacagagaagcactgtgctccctctgcaggaccagccttcccttatctaaggggcatggagctcagggaggctttattccatatgcacgggagaatcaggcagaatgaacccctacccatctttcttggcttttcagtcattttgtgctgttttctctggttcattaataaattgaaactgccctccaaa

SEQ ID NO: 255 - DNA, 5872 bp, Homo Sapiens
gcagaagcctgaagaccaaggagtggaaagttctccggcagccctgagatctcaagagtgacatttgtgagaccagctaatttgattaaaattctcttggaatcagctttgctagtatcatacctgtgccagatttcatcatgggaaacagctgttacaacatagtagccactctgttgctggtcctcaactttgagaggacaagatcattgcaggatccttgtagtaactgcccagctggtacattctgtgataataacaggaatcagatttgcagtccctgtcctccaaatagtttctccagcgcaggtggacaaaggacctgtgacatatgcaggcagtgtaaaggtgttttcaggaccaggaaggagtgttcctccaccagcaatgcagagtgtgactgcactccagggtttcactgcctgggggcaggatgcagcatgtgtgaacaggattgtaaacaaggtcaagaactgacaaaaaaaggttgtaaagactgttgctttgggacatttaacgatcagaaacgtggcatctgtcgaccctggacaaactgttctttggatggaaagtctgtgcttgtgaatgggacgaaggagagggacgtggtctgtggaccatctccagccgacctctctccgggagcatcctctgtgaccccgcctgcccctgcgagagagccaggacactctccgcagatcatctccttctttcttgcgctgacgtcgactgcgttgctcttcctgctgttcttcctcacgctccgtttctctgttgttaaacggggcagaaagaaactcctgtatatattcaaacaaccatttatgagaccagtacaaactactcaagaggaagatggctgtagctgccgatttccagaagaagaagaaggaggatgtgaactgtgaaatggaagtcaatagggctgttgggactttcttgaaaagaagcaaggaaatatgagtcatccgctatcacagctttcaaaagcaagaacaccatcctacataatacccaggattcccccaacacacgttcttttctaaatgccaatgagttggcctttaaaaatgcaccactttttttttttttttgacagggtctcactctgtcacccaggctggagtgcagtggcaccaccatggctctctgcagccttgacctctgggagctcaagtgatcctcctgcctcagtctcctgagtagctggaactacaaggaagggccaccacacctgactaacttttttgttttttgtttggtaaagatggcatttcaccatgttgtacaggctggtctcaaactcctaggttcactttggcctcccaaagtgctgggattacagacatgaactgccaggcccggccaaaataatgcaccacttttaacagaacagacagatgaggacagagctggtgataaaaaaaaaaaaaaaaaagcattttctagataccacttaacaggtttgagctagtttttttgaaatccaaagaaaattatagtttaaattcaattacatagtccagtggtccaactataattataatcaaaatcaatgcaggtttgttttttggtgctaatatgacatatgacaataagccacgaggtgcagtaagtacccgactaaagtttccgtgggttctgtcatgtaacacgacatgctccaccgtcaggggggagtatgagcagagtgcctgagtttagggtcaaggacaaaaaacctcaggcctggaggaagttttggaaagagttcaagtgtctgtatatcctatggtcttctccatcctcacaccttctgcctttgtcctgctcccttttaagccaggttacattctaaaaattcttaacttttaacataatattttataccaaagccaataaatgaactgcatatgataggtatgaagtacagtgagaaaattaacacctgtgagctcattgtcctaccacagcactagagtgggggccgccaaactcccatggccaaacctggtgcaccatttgcctttgtttgtctgttggtttgcttgagacagtcttgctctgttgcccaggctggaatggagtggctattcacaggcacaatcatagcacactttagccttaaactcctgggctcaagtgatccacccgcctcagtctcccaagtagctgggattacaggtgcaaacctggcatgcctgccattgtttggcttatgatctaaggatagctttttaaattttattcattttatttttttttgagacagtgtctcactctgtctcccaggctggagtacagtggtacaatcttggatcaccgcctcccagtttcaagtgatctccctgcctcagcctcctaagtagctgggactacaggtatgtgccaccacgcctggctaatttttatatttttagtagagacggggtttcaccatgttgtccaggctggtctcaaactcctgacctcaggtgatctgcccacctctgcctcccaaagtgctgggattacaggcatgagccaccatgcctggccatttcttacacttttgtatgacatgcctattgcaagcttgcgtgcctctgtcccatgttattttactctgggatttaggtggagggagcagcttctatttggaacattggccatcgcatggcaaatgggtatctgtcacttctgctcctatttagttggttctactataacctttagagcaaatcctgcagccaagccaggcatcaatagggcagaaaagtatattctgtaaataggggtgaggagaagatatttctgaacaatagtctactgcagtaccaaattgcttttcaaagtggctgttctaatgtactcccgtcagtcatataagtgtcatgtaagtatcccattgatccacatccttgctaccctctggtactatcaggtgcccttaattttgccaagccagtgggtatagaatgagatctcactgtggtcttagtttgcatttgcttggttactgatgagcaccttgtcaaatatttatataccatttgtgtttatttttttaaataaaatgcttgctcatgcttttttgcccatttgcaaaaaaacttggggccgggtgcagtggctcatgcctgtagtcccagctctttgggaggccaaggtgggcagatcgcttgagcccaggagttcgagaccagccttggcaacatggcgaaaccctgtctttacaaaaaatacaaaaattagccgggtgtggtggtgtgcacctgaagtcccagctactcagtaggttcgctttgagcctgggaggcagaggttgcagtgagctgggaccgcatcactacacttcagcctgggcaacagagaaaaaccttttctcagaaacaaacaaacccaaatgtggttgtttgtcctgattcctaaaaggtctttatgtattctagataataatctttggtcagttatatgtgttaaaaaatatcttctttgtggccaggcacggtagctcacacctgtaatcccagcactttgcggggctgaggtgggtggatcatctgaggtcaagagttcaagatcagcctggccaacacagtgaaaccccatctctactaaacatgtacaaaacttagctgggtatggtggcgggtgcctgtaaccccagctgctccagaggctgtggcagaagaatcgcttgaacccaggaggcagaggttgcagcgagccaagattgtgccattgcactccagactgggtgacaagagtgaaattctgcctatctatctatctatctatctatatctatatatatatatatatatatcctttgtaatttatttttccctttttaaaattttttataaaattcttttttatttttatttttagcagaggtgaggtttctgaggtttcattatgttgcccaggctggtcttgaactcctgagctcaagtgatcctcccacctcagccttccaaagtgctggaattgcagacatgagccaccgcgcccctcctgtttttctctaattaatggtgtctttctttgtctttctggtaataagcaaaaagttcttcatttgatttggttaaatttataactgttttctcatatggttaacattttttcttgcctggctaaagaaatccttttctgcccaatactataaagaggtttgcccacattttattccaaaagttttaagttttgtctttcatcttgaagtctaatgtatcaggaactggcttttgtgcctgttgggaggtagtgatccaattccatgtcttgcatgtaggtaaccactggtccctgcgccatgtattcaatacgtcgtctttctcctgcgggtctgcaatctcacctaccatccatcaagtttccatagggccatgggtctgcttctgggctccctgttctgttccattgtcaatttgtctatcctgtgccagtatcacactgtgtttattacaatagctttgtaacagctctcgatatccggtaggacatctccctccaccttctttttctacttcagaagtgtcttagctaggtcaggcacggtggctcacgcctgtaatcccagcactttgggaggccgacgcggatggatcacctgaggtcaggagttttgagacagcctggccaacatggtgaaaccccatctctactaaaaaatacaaaaattagtcaggcatggtggcatgtgcctgtaatcccagctatttgggaggctgaggccggagaattgcttgaacccggggggcggaggttgcagtgagccgagatcgtaccattgcactccagcctgggtgacagagcgaaactctgtctcaggaaaaaaaagaaaagagatgtcttggttattcttggttctttattattcaatataaattttagaagctgaatttgaaaagatttggattggaatttcattaaatctacaggtcaatttagggagagttgataattttacagaattgagtcatctggtgttccaataagaataagagaacaattattggctgtacaattcttgccaaatagtaggcaaagcaaagcttaggaagtatactggtgccatttcaggaacaaagctaggtgcgaatatttttgtctttctgaatcatgatgctgtaagttctaaagtgatttctcctcttggctttggacacatggtgtttaattacctactgctgactatccacaaacagaaagagactggtcatgccccacagggttggggtatccaagataatggagcgaggctctcatgtgtcctaggttacacaccgaaaatccacagtttattctgtgaagaaaggaggctatgtttatgatacagactgtgatatttttatcatagcctattctggtatcatgtgcaaaagctataaatgaaaaacacaggaacttggcatgtgagtcattgctccccctaaatgacaattaataaggaaggaacattgagacagaataaaatgatccccttctgggtttaatttagaaagttccataattaggtttaatagaaataaatgtaaatttctatgattaaaaataaattagcacatttagggatacacaaattataaatcattttctaaatgctaaaaacaagctcaggtttttttcagaagaaagttttaattttttttctttagtggaagatatcactctgacggaaagttttgatgtgaggggcggatgactataaagtgggcatcttcccccacaggaagatgtttccatctgtgggtgagaggtgcccaccgcagctagggcaggttacatgtgccctgtgtgtggtaggacttggagagtgatctttatcaacgtttttatttaaaagactatctaataaaacacaaaactatgatgttcacaggaaaaaaagaataagaaaaaaaga

SEQ ID NO: 256 - DNA, 618 bp, Homo Sapiens
agtctcggttagcttcacttcagcgggaacctgcccactaaggaggccgattctttccggctcgagcaggtccggacccgcccctctggcgtctagcagtctcggaggcctgcccgtatagttcagggccggacagcgagcggcggcgacttgccagtaaggtttggctccagcagctgctgttgccaccaccactagttcaagcaccatgcagtttacctcaatatcaaattctttgacctccactgctgctattgggctctcatttacaacttcaacgactaccaccgccactttcaccaccaacactactaccacaatcaccagtggctttactgtgaaccaaaaccaactgttatcaagagggtttgaaaaccttgtaccttatacttcaactgttagtgtagtagcaactcctgtgatgacatatggtcatctggagggtcttataaatgagtggaaccttgagctggaagatcaagagaagtactttcttctccaggccactcaggtcaatgcttgggaccatacattgattgagaatggtgagatgattcgtattttacatggagaagtgaacaaagtgaaactggatcagaaaagattggaacaagaatt

SEQ ID NO: 257 - DNA, 741 bp, Homo Sapiens
gctggagtttcgccgccgcagtcttcgccaccatgccgccctacaccgtggtctatttcccagttcgaggccgctgcgcggccctgcgcatgctgctggcagatcagggccagagctggaaggaggaggtggtgaccgtggagacgtggcaggagggctcactcaaagcctcctgcctatacgggcagctccccaagttccaggacggagacctcaccctgtaccagtccaataccatcctgcgtcacctgggccgcacccttgggctctatgggaaggaccagcaggaggcagccctggtggacatggtgaatgacggcgtggaggacctccgctgcaaatacatctccctcatctacaccaactatgaggcgggcaaggatgactatgtgaaggcactgcccgggcaactgaagccttttgagaccctgctgtcccagaaccagggaggcaagaccttcattgtgggagaccagatctccttcgctgactacaacctgctggacttgctgctgatccatgaggtcctagcccctggctgcctggatgcgttccccctgctctcagcatatgtggggcgcctcagtgcccggcccaagctcaaggccttcctggcctcccctgagtacgtgaacctccccatcaatggcaacgggaaacagtgagggttggggggactctgagcgggaggcagagtttgccttcctttctccaggaccaataaaatttctaagagagcta

SEQ ID NO: 258 - DNA, 1292 bp, Homo Sapiens
tcccgggcagtataaagtttgctgtctcctttgttcgccctcgttgcgcagtagtgctagcggcttcgcggttcggtcctcgcacccggcagccgccactggtgctgagctgctaggaagcccctatcgccgagctcgttggagcttgaacccattgtcacccctccgtcattagatggaaaagccatcaaggtggaacaagccaccaaaccatcatttgaaagtggtagacgtggaccgcctccacctccaagaagtagaggccctccaagaggtcttagaggtggaagaggaggaagtggaggaaccaggggacctccctcacggggaggacacatggatgacggtggatattccatgaattttaacatgagttcttccaggggaccactcccagtaaaaagaggaccaccaccaagaagtgggggtcctcctcctaagagatctgcaccttcaggaccagttcgcagtagcagtggaatgggaggaagagctcctgtatcacgtggaagagatagttatggaggtccacctcgaagggaaccgctgccctctcgtagagatgtttatttgtccccaagagatgatgggtattctactaaagacagctattcaagcagagattacccaagttctcgtgatactagagattatgcaccaccaccacgagattatacttaccgtgattatggtcattccagttcacgtgatgactatccatcaagaggatatagcgatagagatggatatggtcgtgatcgtgactattcagatcatccaagtggaggttcctacagagattcatatgagagttatggtaactcacgtagtgctccacctacacgagggcccccgccatcttatggtggaagcagtcgctatgatgattacagcagctcacgtgacggatatggtggaagtcgagacagttactcaagcagccgaagtgatctctactcaagtggtcgtgatcgggttggcagacaagaaagagggcttcccccttctatggaaagggggtaccctcctccacgtgattcctacagcagttcaagccgcggagcaccaagaggtggtggccgtggaggaagccgatctgatagagggggaggcagaagcagatactagaaacaaacaaaactttggaccaaaatcccagttcaaagaaacaaaaagtggaaactattctatcataactacccaaggactactaaaaggaaaaattgtgttactttttttaaattccctgttaagttcccctccataatttttatgttcttgtgaggaaaaaa

SEQ ID NO: 259 - DNA, 7694 bp, Homo Sapiens
ggagttggcgcggcccctgcagtccggcggagagcggagctgaggatggctgtgcccggctccttcccgctgctggtcgagggctcctggggccccgaccccccgaagaacttgaacaccaagttgcagatgtacttccagagcccgaagaggtcgggaggcggcgagtgtgaggtccgccaggatcccaggagcccatcccgcttcctggtgttcttctacccggaggacgttcggcagaaggttctggagagaaaaaatcatgagttggtatggcaaggaaaaggaacattcaagttaactgtccagttacctgcaaccccagatgaaatcgatcatgtctttgaagaggaacttctaacaaaagaatccaagaccaaagaagatgttaaagaaccagatgtgtcagaagaattggatacaaaactccctcttgatggtggattagacaaaatggaagatatcccagaggaatgtgaaaatatttcctctttggtggcatttgaaaacctcaaggcaaatgtgactgacataatgctaatcttgttagtggagaacataagtggcctgtctaatgatgactttcaagtggaaataataagagattttgatgttgctgttgttacctttcaaaagcacatagatactataagatttgttgatgattgtaccaagcaccattcaattaaacaacttcagctttctccaagacttctggaagtgacaaacacaatcagggttgaaaacctgccacctggtgctgatgactacagtttaaaacttttctttgaaaatccctataatggagggggaagagttgccaatgttgaatattttcctgaagagagttcagctctgattgaattttttgacagaaaagtgttagacaccatcatggccacaaaactcgacttcaataaaatgccactttctgtgttcccatactatgcctcattgggcacagccttgtatggaaaggagaagcctctgatcaagcttccagcaccatttgaagagtcactagatcttcccttatggaagttcttacagaaaaagaatcacctcattgaggagataaacgatgaaatgaggcgttgtcactgtgagctcacgtggtcccaactcagtggtaaagttaccatcagaccagcagccaccttagtcaatgaaggaagaccgagaatcaagacctggcaggcagatacttccacaacactctctagcatcaggtctaaatataaagtcaacccaattaaagtggatccaacaatgtgggacaccataaaaaatgatgtgaaagatgacaggattttgattgagtttgatacacttaaggagatggtaatcttagcagggaaatcagaggatgtccaaagcattgaggtacaagtcagggagttaatagaaagcactactcaaaaaattaaaagggaagagcaaagtttgaaggaaaaaatgatcatttctccaggcaggtattttcttttgtgtcacagcagtctactggaccatttactcacggagtgcccagagatagagatttgttacgatagagtcactcaacacttgtgcttgaaaggacctagtgcagatgtgtataaagcaaagtgtgaaatccaggaaaaggtgtacaccatggctcagaaaaacattcaggtttctcctgagatttttcagtttttgcaacaggtaaactggaaagaattctctaagtgtcttttcatagcacagaagattcttgcactttatgagctagagggtacaactgttctcttaaccagctgttcttctgaagccctgttagaagcagaaaagcaaatgctcagtgccttaaattataagcgcattgaagttgagaacaaagaagttcttcatggcaagaaatggaaagggctcactcacaatttgcttaagaaacaaaattcctccccaaacactgtaatcatcaatgagttaacttcagaaaccacagctgaagtcatcattacaggctgtgtaaaagaagtaaatgaaacctataaattgctttttaacttcgttgaacaaaacatgaaaatagagagactggttgaagtaaagccttccttagttattgactatttaaagacagaaaagaagctattctggccaaagataaagaaggtaaatgtgcaggtaagtttcaatcctgagaacaaacaaaaaggcattttactaactggctcaaagaccgaagtactgaaggcagtggacattgtcaagcaagtctgggattcagtctgtgttaaaagtgtccatactgataagccaggagccaagcagttcttccaggataaagcacggttttatcaaagtgagatcaaacggttgtttggttgttacattgaactacaggagaatgaagtaatgaaggagggaggcagccccgctgggcagaagtgcttctctcggacagtcttggcccctggcgttgtgctgattgtgcagcagggtgacttggcacggcttcctgtcgatgtggtggtgaatgcatctaatgaggaccttaagcattatggtggcctggccgctgcgctctcaaaagcagctggccctgagctccaggccgactgtgaccagatagtgaagagagagggcagactcctaccgggcaatgccaccatctccaaggcaggaaagctgccctaccaccacgtgatccatgcagtggggccccgctggagcggatatgaggccccgaggtgtgtgtacctattaaggagagctgtgcaactcagtctctgtctagccgaaaaatacaagtaccgatccatagccatcccagctattagttctggagtctttggctttcccttaggccgatgcgtggagaccattgtttctgccatcaaggaaaacttccaattcaagaaggatggacactgcttgaaagaaatctaccttgtggatgtatctgagaagactgttgaggcctttgcagaagctgtgaaaactgtatttaaagccaccctgccagatacagctgccccgccaggtttaccaccagcagcagcggggcctgggaaaacatcatgggaaaaaggaagcctggtgtccccgggaggcctgcagatgctgttggtgaaagagggtgtgcagaatgctaagaccgatgttgttgtcaactccgttcccttggatctcgtgcttagtagagggcctctttctaagtccctcttggaaaaagctggaccagagctccaggaggaattggacacagttggacaaggggtggctgtcagcatgggcacagtgctcaaaaccagcagctggaatctggactgtcgctatgtgcttcacgtggtagctccggagtggagaaatggtagcacatcttcactcaagataatggaagacataatcagagaatgtatggagatcactgagagcttgtccttaaaatcaattgcatttccagcaataggaacaggaaacttgggatttcctaaaaacatattcgctgaattaatcatttcagaggtgttcaaatttagtagcaagaatcagctgaaaactttacaagaggttcactttctgctgcacccgagtgatcatgaaaatattcaggcattttcagatgaatttgccagaagggctaatggaaatctcgtcagtgacaaaattccgaaggctaaagatacacaaggtttttatgggactgtttctagccctgattcaggtgtgtatgaaatgaagattggctccatcatcttccaggtggcttctggagatatcacgaaagaagaggcagatgtgattgtaaattcaacatcaaactcattcaatctcaaagcaggggtctccaaagcaattttagaatgtgctggacaaaatgtagaaagggaatgttctcagcaagctcagcagcgcaaaaatgattatataatcaccggaggtggatttttgaggtgcaagaatatcattcatgtaattggtggaaatgatgtcaagagttcagtttcctctgttttgcaggagtgtgaaaaaaaaaattactcatccatttgcctcccagccattgggacaggaaatgccaaacaacacccagataaggttgctgaagccataattgatgccattgaagactttgtccagaaaggatcagcccagtctgtgaaaaaagttaaagttgttatctttctgcctcaagtactggatgtgttttatgccaacatgaagaaaagagaagggactcagctttcttcccaacagtctgtgatgtctaaacttgcatcatttttgggcttttcaaagcaatctccccaaaaaaagaatcatttggttttggaaaagaaaacagaatcagcaacttttcgggtgtgtggtgaaaatgtcacgtgtgtggaatatgctatctcctggctacaagacctgattgaaaaagaacagtgtccttacaccagtgaagatgagtgcatcaaagactttgatgaaaaggagtatcaggagttgaatgagctgcagaagaagttaaatattaacatttccctggaccataagagacctttgattaaggttttgggaattagcagagatgtgatgcaggctagagatgaaattgaggcgatgatcaagagagttcgattggccaaagaacaggaatcccgggcagattgtatcagtgagtttatagaatggcagtataatgacaataacacttctcattgttttaacaaaatgaccaatctgaaattagaggatgcaaggagagaaaagaaaaaaacagttgatgtcaaaattaatcatcggcactacacagtgaacttgaacacatacactgccacagacacaaagggccacagtttatctgttcagcgcctcacgaaatccaaagttgacatccctgcacactggagtgatatgaagcagcagaatttctgtgtggtggagctgctgcctagtgatcctgagtacaacacggtggcaagcaagtttaatcagacctgctcacacttcagaatagagaagattgagaggatccagaatccagatctctggaatagctaccaggcaaagaaaaaaactatggatgccaagaatggccagacaatgaatgagaagcaactcttccatgggacagatgccggctccgtgccacacgtcaatcgaaatggctttaaccgcagctatgccggaaagaatgctgtggcatatggaaagggaacctattttgctgtcaatgccaattattctgccaatgatacgtactccagaccagatgcaaatgggagaaagcatgtgtattatgtgcgagtacttactggaatctatacacatggaaatcattcattaattgtgcctccttcaaagaaccctcaaaatcctactgacctgtatgacactgtcacagataatgtgcaccatccaagtttatttgtggcattttatgactaccaagcatacccagagtaccttattacgtttagaaaataacactttggtatccttcccacaaaattattctccatttgtacatatctagttgtaaaacaagttttagcttttttttttaattcctcttaacagatttttctaatatccaaggatcattctttgtcgctgaagtcagtctttcttcagcttccctttcataatggaaatgaacttattatcttgagagcaaataacttggaaaatttaaatgagataatgcagttgcaactgtgtgtccacaagtatggacatcaaatctgtgggaaaagaacaggtttgtattttcaggaaggagagaataacagtcttatagacagagggcacagctaagcacagctgccactgcaggagacaggccccatgtcaggatgccatagtgctgtggggagcacagtattacccagtgggtagggcttctgtcttccctgggagcagggatggtatcttagtcaatttttttcccttgagatgaggtctgtgcctgatgtacaacggatactccataaatgtttgacaaaccaacgaagaatgaaaaaaagcctagtcagactcccatccaaagtaggaactatctctttaacattcttgactcactatcactttacctcaaattgaacagattccatgacggaacttcattcttcacaaactagccagtgacatgtgggacagctctggccagggctctgggactgcagtgtacttgcgctctgcacggtccaggagctgtgatgtggctgtggtctaggggaatcctgcctgccccatggagttgcgcagcacaaccctggctccaattgccagaaggctctttttaatgctgaaccaaaatgtgcctttttttttttttttttgagatggagtttcactcttgttgcccaggctggagtgcaatggcgcgatctcagctcactgcagccactgcctcccaggttcaagtgattctcctgcctcagcctcccgagtagctgggattacaggcatgcgctaacacacccagctaattttgtatttttagtagagacgaggtttctccatgttcgacaggctggtctcgaactcccacctcagcctcccaaactgctgggattacaggtgtgagccaccgtgaccagccaatgtgccttcttatagtgtctactcattggtctttgttctgcccagtgataacaatgggataacgcctgctacacatcttcattgtgaaacccttcccctgtgctgagattaaatgaactctaagattattaaatagtatattttccttgacagcctagcgtttgatgattttaaagccttatgtataaataaaccaaaggaagtaagcagtcatattgctaatttgctaactcctatctattgaatggtgaagttttaaaaatttccccaggtaagtttaagattcaaacaccatctattgagcacctacattgtgtgccaggtagtaaaataggtgctttcatacacattgtctcaattcctgtgaggtcagaattatctctgcatttgaaacttgaggaaacatgctcagagtgcaagaagcttccttgcctgagatcacctagaaaggaaccctcagagccggcaactgaatcttggtccctgtgatgtcaagcccattgctctcccactgcagaacatggcctctagattaatgccaccgattcaggaacacctccgacagtcttgaaatacccccatgttgccttgtttgttttttccttctggcttcttctattacagtctcttcattggaagctctgtaggccaaggccagagctgatactgacacggagccaatgcagatagcacatcagatgctaggggtcgctgggaggattaagggacttaatctgctaggaacacctgtacttgaagtggaggaggctagggggccacagttgctgcttcattaacatagaggttttggatttttttctcttgtggtttgttttttaagtggattggcagactccttgttgcttaagagtggctttctaggcaggccactggcatctgaattcatcattgacaataaatgtaagaaattggaataaaaaagagagacctgctgttattcgcttttgttctccagtgatttgattaactcagggcaaggctgaatatcagagtgtatcgcactgaagaataataatccattcagtaatgttatagttatcctcaatctaaatatgtcaactgtcattttgctacttttcaaataaaatacttgaaaactgtca

SEQ ID NO: 260 - DNA, 5585 bp, Homo Sapiens
agtcgcaggaggcgctccttggcggtgcctggagcccgggcgcaccccaccgctcccgggacctgttgggggctggcccgaaccgtcgtcgaagggagccgctcggccacccccgacgttcctcgccccgcccgacgttccctcaagtggccgaaccagccggacgagccaaactcgccgggcctcccggcggcagcaggtggccccgtccttccagggagggccctgcgccccgcggcgctccggagccctctcggccgcccccgccaggcgggatggaggcggatggggacggagaggagctggcccggctgcgctcagtcttcgccgcctgcgacgcgaaccgctcggggcgcctggagcgcgaggagttccgggcactgtgcacggagctgcgggtgcggccggccgacgccgaggcagtattccagcggctggacgccgaccgtgacggcgccatcaccttccaggagttcgcgcgtggcttcctcgggtccctccgcggggggcggcgccgggactggggtcctctggatcccgcgcccgccgtgtctgaggcggggccggagacacacgacagcgaggaggacgaaggcgacgaggacgcggcggcggcgctggccacctcgtgcggcccggcgagtcccggccgggcttggcaggatttccaggcgcgacttggggacgaagccaagttcattcccagagaagagcaagttagtaccttgtaccaaaacatcaaccttgtggagccaagattaattcagccatatgaacatgttataaagaacttcatccgtgagatcagacttcaaagcacagaaatggaaaatttggccattgcggtgaagagagcccaggacaaggcagctatgcagttgagtgagttggaagaggaaatggatcagaggattcaggctgcagaacataagacacggaaagacgaaaaacgcaaagctgaggaagccctcagtgacctcagacgtcagtatgaaactgaagtaggagatctgcaggtgaccattaaaaagctaagaaagctcgaagaacaatcaaaacgcgtaagtcaaaaggaagatgtggctgcattgaaaaaacaaatttatgatttatcaatggaaaaccagaaagttaagaaagaccttttagaagcacagacaaacatagcctttcttcagagtgagttagatgctttgaaaagtgattatgctgatcagagtctgaatactgaaagggatctggaaataatccgagcatacacagaagatcgaaatagtcttgagaggcaaattgaaatactccaaacagctaaccggaagctacatgacagtaatgatggccttagaagtgcccttgaaaacagttatagcaagttcaacagatctttgcatataaataatatctcaccagggaatacaatttctagaagcagtcccaaattcattggtcattcccctcaacctctaggctatgacaggtcatcccgctcttcctatgtggatgaggactgtgactccctggccctctgtgatcctctgcagaggacaaattgtgaagttgacagcctgcctgaaagctgcttcgacagcggcttgtctaccttgagagatcccaatgagtatgactcagaagtggaatacaagcaccagaggggatttcagaggtcacacggggtgcaggagagctttggaggtgatgcttcagacacagatgttcctgacataagggatgaagagacatttggtttagaagatgtggcttccgtcttagactggaagccccaagggtctgttagtgaaggcagcattgttagttcatcaagaaagcccatctcagcactctcgccccagacagacctggtagatgacaacgctaaatcttttagctcacagaaggcttacaagattgtacttgctggggacgctgcagtggggaagtctagtttcctcatgagactttgcaagaatgaatttcgagaaaatataagcgccaccctgggagttgatttccaaatgaaaaccctcattgtggatggagaacgaacagttctgcagctctgggatacagctggtcaggagagattcagaagtattgccaagtcttacttcagaaaggcagatggtgttttgctgctgtatgatgttacatgtgagaaaagctttcttaacatacgagaatgggtagatatgattgaggatgcagcccatgagactgttcccattatgctggtaggaaacaaggctgacattcgtgacactgctgctacagagggacaaaaatgtgtcccagggcactttggagagaaactggccatgacgtatggggcattattctgtgaaacaagtgccaaagatggttctaacatagtggaggctgttctgcaccttgctcgagaagtgaaaaagagaactgacaaggatgacagcagatccattaccaatctaaccgggaccaattccaaaaagtcaccacagatgaagaattgttgcaatggctaaatcccaaacatccttggcctgtgaagtcttcatttccagaatactgaatttgtgtgacttatttggctcttaacagagtggcacatcctactgacactgtcctatggagagttacagtgcaggaaacctgaacccagctctcaggtccctctggaactttggctcttctttgttttgtctcagtgagtgatttgggccctctggctaaatagactagtcatgtccttacaggtcttaaaagataacatgtaaatgtttttaaaatggtaaaaaaaaagaaaagaaaagaaatcacatgctcagatcaaagctgtagaggaaactgacataattagattcatgtggtagctgaattaggttacccacaaagtcagcatttaaatatttgatactaaagttctagtaagaagggattctcatcctagctttgctgttaactggccttgtgaccttggacatgtcacaagcccatgtcggatctgtttcttcatctgtaaaatgtgcagcttgccctcaaaggccttgcagcccttggcacctcagattctgtgggaagcagtaggacagagagtgtggtggcccacagttaataatagaactatggttattcctgctttttaatattggagtattgatttttctcacttctgaaataaggacagaatttgattaaaaaatggaaacagaaatatctattttttatgtataaagaaacatgtttgagacaaaaatagttgtatataaaaggatatttcataatctcagaatagttacaaagctcactgcttgaatttggtgttaaaaattctaatggaaacatgtaaagccacatactactgaaagcacaatgcccaggaaagttgtcactcttcacttaagggagtggttgccaggggctgagaaagggaggatggggagtgactgctaataggtatgtggtttctttgggcgatgatgagaatgttctggaattggaatagtggtgatagttgtataactgtttgaatgtactaggaaccactgaattgtatactttgaaagggtgaattttatggttgtgaattatctcactaaaaaaaatgctagtacttagagtgatgtaacattttgcaaaattttcattttcgtatccctgctgatttcaaaccttcccatggtttagaagcataacctgtaatgtaatgcaagtcccctaactccctggttgctaacattaacttccttaagtaataatcaatgaaagaaattctatgcatggttttgaaataatatccttgaaagaggaatcaccattaggaaaggtgagtcagggtcctttgtttaatgtgactagtggctcatcatcaccagtgacctggttgggcctactctccttccagaacctgcattgcttcccagacctccccactgagatgcctctaagagccaaaggagtcaacacttgagcctagggtgggctacaacaaaagattctaatttaccttgcttcatctaggtccaggccccaagtagcttgctgaaggaacttaaaaagtagctgttatttattgtattgtataagctaaaaacatttatttttgttgaatcgaaacaattccatgtagcaatcttttttctgttcacggtgtttgtgatagaaccttaaattccgcaagcatcagttttttgaaaaaatgggaattgaccggatagttacaggcaaagattataaatagctacaacatcatttaacttttataaacatgccttctctctattgaagacatctgatatttttgctggaaagttggatctatcctcagtaactctgccatgaattcctgtttcctggttccagaaaaagaaaagattacatttctgatcataaagaatgtcttgcatatgggaaatttttcaaaataaggggggtattatttatgtggcatgggaaaacttttgccatggctgtttgtcttagtggcatcttttgatgacattggatcagatatatgtagatgctgatatatgggacacatgtttaggttttggtgcagttgcacaaaactgtgttagtttatatgttactgtgttgcctttatttattctctccaaagtgtctctttatatttgttttacaatctgtgaaagagtataccataatacagaagtattttcatagtctttacctctggattgtcctgtcagtatagccacgttgatgagattacaccagtgcctttgatggtcaaccaatcatctttaagtatttgagccctgataaatattttggtaacataatccaaattagagacttagagctctggttagcaatcatgtttaaagagaagcttcttaaagctctgtatgctgggagattcatgattattaccaacgttttgatttcatgaaggtgttctcaaatttaaagcacattttcagtaagaacaaaaatatttaatgtttttatcttagacttgatacatttgcatattactatggaagttattcaccttgtccctgtttttctttaagatattttaaaatcatagttatactacagtccttttttaaatgtatcctgatacattgtaaaatattttaatttcattgtggaaaataatgttggataaggagatatttttcactgttaacttttagcccatgcattttcataatttatttttttcacttgctgctttatatgacatatgtgacatttgattatttaacacttgatgtgatctgcataaacccaagttgcacaaccctcctgctgaagataaaattgaggttaaagataaagatttattttcatatttgtacagtgatcggcttcagtgatggtttttgtgggcatttattgtgtgtgtgtaagaaatttcatatgtatatattaagtaggcctctgagtattgaataattgttttatgattttgatttatatggtttacattttcattgtgtgggccatatttcgtttatactgtttatttctcttcaaaccttaataattataccataaagtgtaatttttatagcaatgcaaatgtctaaggaactacaaatattttctacgttgtaaattcaataaagcttgcttcctttggc

SEQ ID NO: 261 - DNA, 666 bp, Homo Sapiens
ggaggaggcgccgccgccgctcccgaggcccctgccgccgccgctcccgctgctgtcgccgcgcagagccggagcaggagccacggccgagaggagggaggaggaggaggaggaggtggaggaggtggaggaggtggaggaggcgccggaccgggggggatagattcccagaagtgggataactggatcagagggtgattaccctgtgtataagagtatgtgtctcactgcaccttcaatggcattgagtagatcgtcagtatttaaacagatcacatcatgcgtgagtacaagctagtggtccttggttcaggaggcgttgggaagtctgctctgacagttcagtttgttcagggaatttttgttgaaaaatatgacccaacgatagaagattcctacagaaagcaagttgaagtcgattgccaacagtgtatgctcgaaatcctggatactgcagggacagagcaatttacagcaatgagggatttgtatatgaagaacggccaaggttttgcactagtatattctattacagctcagtccacgtttaacgacttacaggacctgagggaacagattttacgggttaaggacacggaagatgttccaatgattttggttggcaataaatgtgacctggaagatgagcgagtagttggcaaagag

SEQ ID NO: 262 - DNA, 988 bp, Homo Sapiens
cggtggcggcggcagctgcggcgggacccgtgttctggaggcgactgctgggcctcctgcctggccgcccagggctggccgcgctcctgggacgcctgtccgaccgcctcggcaggaaccgggaccgccagcgcaggaggtcaccatggctgttattggctcccttgctgtccccagctgttccccaggtcacctccccaccttgctgcctgtgtccagaaggcgtgcaccggttccagtggatcagaaacctggttccagaatttggagtctccagttctcacgttagggtgctttcttccccggcagagtttttcgagctcatgaaggggcagataagagtagccaagaggcgggtcgtgatggcatccctctacctggggacaggtcctttggaacaggagctggtggactgcctggaaagtactctagaaaagtcactccaagcaaagtttccttcaaatctcaaggtctccattctcttagacttcacgcggggctcacgaggccggaagaactcccgcacaatgctgctcccactcctgcggaggttcccagagcaggtccgagtctccctctttcacacgccgcacctccgtgggctgcttcggctcctcatccctgagcgcttcaacgagaccatcggcctccagcacattaaggtgtacctcttcgacaacagcgtcatcttgagcggtgcaaacctgagtgactcctacttcaccaaccgccaggaccgctacgtgttcctgcaggactgtgcggagattgccgacttcttcacggagctggtggacgcggtgggggatgtgtccctgcagctgcagggggacgacacggtgcaggtggtggatgggatggtgcatccttacaaaggggaccgggccgagtactgcaaggcagccaataagagggtcatggatgtgatcaactcagccaggacccgccagcagatgctgcatgcccagaccttccacagcaactctct

SEQ ID NO: 263 - DNA, 3383 bp, Homo Sapiens
aggagggaagcctggtggggagaagggagcccgcaggatcaggggtcagagttagggggcttccctcctgctgcaccctcatctcagggccgccaacttccagctgcagcggcgactttcagtttcatttccacggaccctcctgcctgggccgcagccgccgccgcgatgcccagtaagttcagctgccggcagctccgggaggcgggccagtgtttcgagagtttcctggtcgttcggggactggacatggagacagatcgcgagcggctgcggaccatttataaccgcgacttcaagatcagctttgggacccccgcccctggcttctcctccatgctgtatggaatgaagattgcaaatctggcctacgtcaccaagactcgggtcaggttcttcagactcgaccgctgggccgacgtgcggttcccagaaaagaggagaatgaagctggggtcagatatcagcaaacaccacaagtcactgctagccaagatcttttatgacagggctgagtatcttcatgggaaacatggtgtggatgtggaagtccaggggccccatgaagcccgagatgggcagctccttatccgcctggatttgaaccgcaaagaggtgctgaccctgaggcttcggaatggcggaacccagtctgttaccctcactcacctcttcccactctgccggacaccccagtttgctttctacaatgaagaccaggagttgccctgtccactgggccccggtgaatgctatgaactccatgtccattgtaagaccagctttgtgggctacttcccagccacagtgctctgggagctgctgggacctggggagtcgggttcagaaggagccggcacattctacattgcccgcttcttggctgccgtcgcccacagccccctggctgcacagctgaagcccatgactcccttcaagcggacccggatcaccggaaaccctgtggtgaccaatcggatagaggaaggagagagacctgaccgcgctaagggctatgacctggagttaagtatggcgctggggacatactacccacctccccgcctcaggcagctgctccccatgcttcttcagggaacaagtatcttcactgcccctaaggagatcgcagagatcaaggcccagctggagacagccctgaagtggaggaactatgaggtgaagctgcggctgctgctgcacctggaggaactgcagatggagcatgatatccggcactatgacctggagtcggtgcccatgacctgggaccctgtggaccagaaccccaggctgctcacgctggaggttcctggagtgactgagagccgcccctcagtgctacggggcgaccacctgtttgcccttttgtcctcggagacacaccaggaggaccccatcacatataagggctttgtgcacaaggtggaattggaccgtgtcaagctgagcttttccatgagcctcctgagccgctttgtggatgggctgaccttcaaggtgaactttaccttcaaccgccagccgctgcgagtccagcaccgtgccctggagctgacagggcgctggctgctgtggcccatgctctttcctgtggcacctcgggacgtcccgctgctgccctcagatgtgaaactcaagctgtacgaccggagtctggagtcaaacccagagcagctgcaggccatgaggcacattgttacgggcaccacccgtccagccccctacatcatctttgggcctccaggcaccggcaagactgtcacgttagtggaggcaattaagcaggtggtgaagcacttgcccaaagcccacatcttggcctgcgctccatccaactcaggggctgacctactctgtcaaaggctccgggtccaccttcctagctccatctaccgcctcctggcccccagcagggacatccgcatggtacctgaggacatcaagccctgctgcaactgggacgcaaagaagggggagtatgtatttcccgccaagaagaagctgcaggaataccgggtcttaattaccaccctcatcactgccggcaggttggtctcggcccagtttcccattgatcacttcacacacatcttcatcgatgaggctggccactgcatggagcctgagagtctggtagctatagcagggctgatggaagtaaaggaaacaggtgatccaggagggcagctggtgctggcaggagaccctcggcagctggggcctgtgctgcgttccccactgacccagaagcatggactgggatactcactgctggagcggctgctcacctacaactccctgtacaagaagggccctgatggctatgacccccagttcataaccaagctgctccgcaactacaggtctcatcccaccatcctggacattcctaaccagctctattatgaaggggagctgcaggcctgtgctgatgtcgtggatcgagaacgcttctgccgctgggcgggcctacctcgacagggctttcccatcatctttcacggcgtaatgggcaaagatgagcgtgaaggcaacagcccatccttcttcaaccctgaagaggctgccacagtgacttcctacctgaagctgctcctggccccctcctccaagaagggcaaagctcgcctgagccctcgaagtgtgggcgtcatctccccgtaccggaaacaggtggagaaaatccgttactgcatcaccaaacttgacagggagcttcgaggactggatgacatcaaggacttgaaggtgggttcagtagaagaattccaaggccaagaacgaagcgtcatcctcatctccaccgtgcgaagcagccagagctttgtgcagctggatctggactttaatctgggtttccttaagaaccccaagaggttcaatgtagctgtgacccgggccaaggccctgctcatcatcgtggggaacccccttctcctgggccatgaccctgactggaaagtattcctggagttctgtaaagaaaacggagggtataccgggtgtcccttccctgccaaactggacctgcaacagggacagaatttactgcaaggtctgagcaagctcagcccctctacctcagggccccacagccatgactacctcccccaggagcgggagggtgaagggggcctgtctctgcaagtggagccagagtggaggaatgagctctgaagacacagcacccagccttctcgcaccagccaagccttaactgcctgcctgaccctgaaccagaacccagctgaactgcccctccaagggacaggaaggctgggggagggagtttacaacccaagccattccaccccctcccctgctggggagaatgacacatcaagctgctaacaattgggggaaggggaaggaagaaaact

SEQ ID NO: 264 - DNA, 2527 bp, Homo Sapiens
atcctccgcccagcaccccaggattcaggcgttgggtcccgcccttgtaggctgtccacctcaaacgggccggacaggatatataagagagaatgcaccgtgcactacacacgcgactcccacaaggttgcagccggagccgcccagctcaccgagagcctagttccggccagggtcgccccggcaaccacgagcccagccaatcagcgccccggactgcaccagagccatggtcggcagaagagcactgatcgtactggctcactcagagaggacgtccttcaactatgccatgaaggaggctgctgcagcggctttgaagaagaaaggatgggaggtggtggagtcggacctctatgccatgaacttcaatcccatcatttccagaaaggacatcacaggtaaactgaaggaccctgcgaactttcagtatcctgccgagtctgttctggcttataaagaaggccatctgagcccagatattgtggctgaacaaaagaagctggaagccgcagaccttgtgatattccagttccccctgcagtggtttggagtccctgccattctgaaaggctggtttgagcgagtgttcataggagagtttgcttacacttacgctgccatgtatgacaaaggacccttccggagtggcattctgcatttctgtggcttccaagtcttagaacctcaactgacatatagcattgggcacactccagcagacgcccgaattcaaatcctggaaggatggaagaaacgcctggagaatatttgggatgagacaccactgtattttgctccaagcagcctctttgacctaaacttccaggcaggattcttaatgaaaaaagaggtacaggatgaggagaaaaacaagaaatttggcctttctgtgggccatcacttgggcaagtccatcccaactgacaaccagatcaaagctagaaaatgagattccttagcctggatttccttctaacatgttatcaaatctgggtatctttccaggcttccctgacttgctttagtttttaagatttgtgtttttctttttccacaaggaataaatgagagggaatcgactgtattcgtgcatttttggatcatttttaactgattcttatgattactatcatggcatataaccaaaatccgactgggctcaagaggccacttagggaaagatgtagaaagatgctagaaaaatgttctttaaaggcatctacacaatttaattcctctttttagggctaaagttttagggtacagtttggctaggtatcattcaactctccaatgttctattaatcacctctctgtagtttatggcagaagggaattgctcagagaaggaaaagactgaatctacctgccctaagggacttaacttgtttggtagttagccatctaatgcttgtttatgatatttcttgctttcaattacaaagcagttactaatatgcctagcacaagtaccactcttggtcagcttttgttgtttatatacagtacacagataccttgaaaggaagagctaataaatctcttctttgctgcagtcatctactttttttttaattaaaaaaaatttttttttgaagcagtcttgctctgttacccaggctggagtgcagtggtgtgatctcggctcactgcaacctctgcctcccaggttccagcaattctcctgcctcagcctccctagtagctgggatgacaggcgcctgccatcatgcctgactaatttttgtatttttagtagagacggcgtttcaccatgttggccaggctggtctcaaactcctgacctcaggtgatccgcctacctcagcctcccaaagtgctgggattacaggcgtgatccaccacacctggcccttgcaatcttctactttaaggtttgcagagataaaccaataaatccacaccgtacatctgcaatatgaattcaagaaaggaaatagtaccttcaatacttaaaaatagtcttccacaaaaaatactttatttctgatctatacaaattttcagaaggttattttctttatcattgctaaactgatgacttactatgggatggggtccagtcccatgaccttggggtacaattgtaaacctagagttttatcaactttggtgaacagttttggcataatagtcaatttctacttctggaagtcatctcattccactgttggtattatataattcaaggagaatatgataaaacactgccctcttgtggtgcattgaaagaagagatgagaaatgatgaaaaggttgcctgaaaaatgggagacagcctcttacttgccaagaaaatgaagggattggaccgagctggaaaacctcctttaccagatgctgactggcactggtggtttttgctctcgacagtatccacaatagctgacggctgggtgtttcagtttgaaaatattttgttgccttcatcttcactgcaattttgtgtaaatttctcaaagatctgaattaaataaataaaattcatttctacagacccaca

SEQ ID NO: 265 - DNA, 2435 bp, Homo Sapiens
ctcttggctccgctagtgcccggcgcgccgccgccagtgctgcgggctccgggcaatggatgcccccggggccctggcccagaccgccgcccccggtccgggcaggaaggagctgaagatcgtgatcgtgggcgacggcggctgcggcaagacctcgctgctcatggtgtacagccagggctccttccccgagcactacgccccatcggtgttcgagaagtacacggccagcgtgaccgttggcagcaaggaggtgaccctgaacctctacgacacggccgggcaagaagactatgaccggctgcggcccctgtcctaccagaacacccacctcgtgctcatctgctatgacgtcatgaatcccaccagctacgacaacgtcctcatcaagtggttccctgaggtcacgcatttctgccgcgggatccccatggtgctcatcggctgcaagacagacctgaggaaggacaaggagcagctgcggaagctccgggccgcccagctggagcccatcacctacatgcagggcctgagcgcctgcgaacagatccgagctgctctctacctggaatgttccgccaagtttcgggagaatgtggaggacgtcttccgggaggccgccaaggtggctctcagcgctctgaagaaggcgcaacggcagaagaagcgccggctctgcctgctgctctgacccagggcagacagacctcacgacagcactgacagggcccgggggcccaggtgccgattgcaccagggaggctgccccatcccgaccctccagctcatggtgtctggggcctgcggctagactcttggaacattctggaactctctcctttcctggctggggctctgaccacaaactcccctccaggctgcccctgggacatggtggtgatgtgggtgcaggagccagtgtctgttgtcgggactcgcaagtgccctcatcacagccacccccaccacgagtgtctccccagtgcagactcaagttatgcttgaaatgaaaaagtctatctggtagtgggtaaacgtagacctggcactgttccacgcgggcgccccaagcctgccactcctgtgtccctgcctccctgggctcccgagataggcaccactgtatcctccagctccttccttccttcccccaggaacacggaggccaccgagggggctgggcctatcaggaggacacaggctgcagcctggcacccacccctcccatctccaccccacatggaagacttgtcttcaacttggccactgtctttgcagagctgggcacatgtgcccagggggcagaaaaaatggcttctcagttgttaaaagtataccctggaccacccatctgaccatctccttaaggtttcacccaaagcccccagtgtcagagacttgggatgggaagaacagtcggctcccagtgtggtcatgagcaagttttctgtggactgttccccccactgtggtaggacaggactggcccacttagtcctcaagctcccaacctgctgtccctcaagccccgcttctaccagcctgtggagttcaggaggcgagacatcctggcctcctttgagaactgatgggatctaccccctgtccacgcgggacagtttctcagaactggttcatagaccacctgtgtcaccaacagccagatacctaatccctgagcctcctttgggaaggtctggggccgagggtctgggaatttttttttttttttttttttgggacagagtctcattctgtcactcaggctagagtgcagtggcatgatcttggctcactgcaagctccacctcctgggttcaagcgattctcttgcctcagcctcctgagtagctgggactacatgcgcacaccaccacgtccggctaatttttgtatttttagtagagacagggtttcaccatgttggccaggctggtcttgaactcctgacctcgtgatccacccgccttagcctcccaaagtgctgggattacaggcgtgagccaccgtgcccggcccaggacttttaaaacaagcatcccaggggattccggtgcctaccagaagtcgcaagctgcttggctctggagggcgcctaggagtcggtgtcgcctaagatgggataatggcttcaggcaactcctagccttccccatatctcctgcctcagcccccctggcccagtgctggggcgtcagctaaacctgagcttccaagaagtcaggttgccaaaggaaggagccttctgagaccctccccaacccacccaggttcccaaggccctgccgtaccctggggaatcaaccaaggagttcttgttctcgaagaaccccaggcctcatgatggtctacggtagaggtccaacaactacagcctgtgggccacatctggccacagcctgatttgtaaataaagttttattggaacacagcaa

SEQ ID NO: 266 - DNA, 2061 bp, Homo Sapiens
cccgctatgttcgtcccgcgcatccacacgccgtgccggggaccgagtgtcagcccacgcgtgggcgcccagtgctcccggctttcggcggtcccagctccgcgcccaggcgacaggttttgggctccctgtgctggtggcaagggctggcttactgcccaggtggctggagggaatcgtgacctacggagactgcgggaagaggcgccacagccaacatgcccatcactcggatgcgcatgagaccctggctagagatgcagattaattccaaccaaatcccggggctcatctggattaataaagaggagatgatcttccagatcccatggaagcatgctgccaagcatggctgggacatcaacaaggatgcctgtttgttccggagctgggccattcacacaggccgatacaaagcaggggaaaaggagccagatcccaagacgtggaaggccaactttcgctgtgccatgaactccctgccagatatcgaggaggtgaaagaccagagcaggaacaagggcagctcagctgtgcgagtgtaccggatgcttccacctctcaccaagaaccagagaaaagaaagaaagtcgaagtccagccgagatgctaagagcaaggccaagaggaagtcatgtggggattccagccctgataccttctctgatggactcagcagctccactctgcctgatgaccacagcagctacacagttccaggctacatgcaggacttggaggtggagcaggccctgactccagcactgtcgccatgtgctgtcagcagcactctccccgactggcacatcccagtggaagttgtgccggacagcaccagtgatctgtacaacttccaggtgtcacccatgccctccacctctgaagctacaacagatgaggatgaggaagggaaattacctgaggacatcatgaagctcttggagcagtcggagtggcagccaacaaacgtggatgggaaggggtacctactcaatgaacctggagtccagcccacctctgtctatggagactttagctgtaaggaggagccagaaattgacagcccagggggggatattgggctgagtctacagcgtgtcttcacagatctgaagaacatggatgccacctggctggacagcctgctgaccccagtccggttgccctccatccaggccattccctgtgcaccgtagcagggcccctgggcccctcttattcctctaggcaagcaggacctggcatcatggtggatatggtgcagagaagctggacttctgtgggcccctcaacagccaagtgtgaccccactgccaagtggggatggggcctccctccttgggtcattgacctctcagggcctggcaggccagtgtctgggtttttcttgtggtgtaaagctggccctgcctcctgggaagatgaggttctgagaccagtgtatcaggtcagggacttggacaggagtcagtgtctggctttttcctctgagcccagctgcctggagagggtctcgctgtcactggctggctcctaggggaacagaccagtgaccccagaaaagcataacaccaatcccagggctggctctgcactaagagaaaattgcactaaatgaatctcgttcccaaagaactacccccttttcagctgagccctggggactgttccaaagccagtgaaatgtgaaggaaagtggggtccttcggggcgatgctccctcagcctcagaggagctctaccctgctccctgctttggctgaggggcttgggaaaaaaacttggcactttttcgtgtggatcttgccacatttctgatcagaggtgtacactaacatttcccccgagctcttggcctttgcatttatttatacagtgccttgctcggcgcccaccaccccctcaagccccagcagccctcaacaggcccagggagggaagtgtgagcgccttggtatgacttaaaattggaaatgtcatctaaccattaagtcatgtgtgaacacataaggacgtgtgtaaatatgtacatttgtctttttataaaaagtaaattgttta

SEQ ID NO: 267 - DNA, 3733 bp, Homo Sapiens
agagagccctccttagccaacacgctaactccgaagcctcccttacgcccccgaaccaccgaaggcggcgacacctgattcagcgcacaaacacaggtcccttctgtcccggatacaattacgcggcagacacacactcaaactcgcgcggggcagccaagagacgagctatgaagtcttacactccatatttcattctcctgtggagtgctgttgggatagcgaaggctgccaaaatcatcatcgtgccgccaattatgtttgaaagccatatgtacattttcaagacgctagcctcagccttgcacgagagaggccaccatacagtgttcctcctctctgaaggcagagacatcgccccatctaatcattacagcctccagcgctacccagggatctttaacagtaccacctcagatgctttcctacagtccaagatgcggaatattttctctgggagattgacagcaatcgaactgtttgacatactggatcactatactaagaactgtgacctgatggttggcaaccatgccctgatccagggtctgaagaaagaaaaatttgacctgctgctggtggaccctaatgatatgtgtggatttgtgatagctcatcttttaggggttaaatatgctgtattttcaactggcctttggtatcctgctgaagtgggtgctcctgctccattagcatacgtcccagagtttaactcactcctcacagaccgcatgaacttgctgcaaaggatgaaaaataccggtgtttacctcatttccagattaggggtcagctttctggttcttcccaaatatgaaaggataatgcagaagtacaacctgctgccagagaagtccatgtatgatttggttcatgggtccagcctgtggatgctgtgtactgacgtagcactggaattcccaagacccactctgcctaatgttgtttatgtaggaggaatcctaaccaaaccagccagcccactaccagaagatctccaaagatgggtaaatggtgctaatgaacatggctttgtcttggtgtcttttggagctggtgtcaagtatctgtcagaagacattgctaacaaactggcaggagctctggggagattgcctcaaaaagtgatttggaggttttctggacccaaaccaaagaatctaggaaacaacactaaactcatagaatggttaccacaaaatgacctgcttgggcattcaaagattaaagccttcctgagccatggtggtttgaacagtatttttgaaactatatatcatggtgtgcctgtagtgggaattccactctttggagaccattatgatactatgaccagagtacaggcaaaaggcatggggatattgctagaatggaagacagttactgaaaaagagctctatgaagcactagtgaaggttatcaataatcccagctaccgtcagagggctcagaagctttcggaaattcacaaggatcaacctggtcaccctgtcaatcgaactatctattggatagattatattattcgtcacaatggagcccatcacctacgtgccgctgtccatcagatctccttttgtcagtattttttactggatattgcctttgtgcttttgcttggtgctgccttgttatactttctcttgtcttgggtgacaaaatttatctacagaaaaatcaaaagtctgtggtctagaaataagcatagcacagttaatggacattaccacaatggaatcctcaatggcaagtacaaaagaaatggccatattaaacatgaaaagaaagtgaaatgagccaacagcccaggtgatagaaataaattggttcactcattgaatttttattgctattatttagtctaacagctactaaaagtaaaacatcagtaaacaattctaacatgcccttatgagatctactaatgaaattctgtggaattaagatggctgtaaaaagcacaaacctaaaatgcagaaatgtattttattcaaatactgatgtagagagttttggcactgaaccttttagaagccttaattatttaaatcaattcagtgactgtgtcagaccttagttttaaatcttgatatgtgcgtgtcccggatcaggaatggtttcatttttcttaataatgtgtgtgtgtgtatgtgtgtgtgtgtgtgtgtgtgtttgtgtgtgtgtgtgtgtgtcctaattaagagaatttttactggctgcttgttacatttgttgagggtacaacacactcaagaataaagtaaaaggatagtcaggatccagatgtttcttttctagcatttaatgtgtgtgaactcagaacactaccatgaaagaacacttccccccaaaactggatgcagaggaagaaaaaaaaaaaagaaatggcacagttttttgtatttttttttttagttattttttgttgttgttgtttgtattgtttttcttttctgatagagtatggccacttctgggggaaaaacatgtaattaagtaaatgtatacattggttttcacgttttacttttgttttcccactaccaataattttcctctggaagaattttatagttttttctatttcattttaatgagtaacaatatgttaaatgcataattaagacaaagcaatgaaattctgactttattcaaagtactgaagattattgcttctagggcatttttaaacagcaccattgtattgttgaatgtttatgtaactgatggcttttctataatgtaatttttgaatgttcaggtgttacatttccaaagtttaacttttaaaaaaccatcttctgatcccttttattgtctgggccatacaatctatattacataggtgccaacatttaattcttttaaatggaacatttgcagttttccatattggtacctgctttttctggagaggtttgagatcttgttaacaaatcagactttacactatatacagatgtgacagataaattgaaccacttgtttgtgaaaatgagttcctgtcatcttcctcattcactcagccctcaccccagcagccttttccggtcattgtagctgacatggagcagtgacagtattcatttgagaacagggatgcaagtcacagacatcataaaatcagggtctccctgctgaagcattcactagttggcaactatgaatttattccatgtcattctgtttacttagcacttgcactacccttgttggttgagtgtatgctttatttgtttctagtttgaaatcccacatctgatagctgagagtaggcaaatacaacatttacctaatgtcattcactaacatggaagagttgtgaaaattctagagtgctgtaaatccttggcatacactatgacaaacaacttcattactctcccaccaggagctgctctcctgcacttagaaataatgtcacaagtagttttctaatgtacaatgcagacaaatgtactgctctctgaatacttgaagaaatggtattatacatacatagaaacttattagttataccttttcacaatcttattacgatgttgccgttaaaagggaaaaaagacacaggcaatgaatggtgggatagtaagaggacttagagtgtatgaatgagttgattttacttttttggaatttgattaagttgacagtaggcactgattggatgattaaacataagttaatctccactgtgataaaaacttaaataataaacatgatttaaaataga

SEQ ID NO: 268 - DNA, 920 bp, Homo Sapiens
cttcccacaaactgggaggaaaactgagacctcctggtcacccgccgccgggccttttagaaactcccacaagctctgccttccctccctggtcctcttcagaccccctcttagttcttcgcggctaacggtaagctctctccttacctctccctaatcggcccctctggagaggaaaagaaaacttaagagtcgggtcgcgctagcctccagcagccgccgcgcccaccgactgctccgccccttctcctccccctcctccaggctcgcgctcggggccgggtgtggagctggaacagagggctggcaaggcgcgcatgcgcaccgagggtggagccgctgagcacagaaccggaaacttagagacaaagttcggagccccgcccccgccgcgcgccgctgagttgtctggccccgccgacccacggcccacgacccaccgacccacgaatcggcccggccgtcgcgtgcaccatgtctggctcctccagcgtcgccgctatgaagaaagtggttcaacagctccggctggaggccggactcaaccgcgtaaaagtttcccaggcagctgcagacttgaaacagttctgtctgcagaatgctcaacatgaccctctgctgactggagtatcttcaagtacaaatcccttcagaccccagaaagtctgttcctttttgtagtaaaatgaatctttcaaaggtttcccaaaccactccttatgatccagtgaatattcaagagagctacatttgaagcctgtacaaaagcttatccctgtaacacatgtgccataatatacaaacttctactttcgtcagtccttaacatctacctctctgaattttcatgaatttctatttcacaagggtaattgttttatatacactggcagcagcatacaataaaacttagtatgaaa

SEQ ID NO: 269 - DNA, 1811 bp, Homo Sapiens
gaaaaaagctaccgtggcacgtgccccggggagtgatgcggtggcccggtttgcacggagagcgggacaccgcctggggagccgcgctcgtagcctgggggcgggacgcggcggccgctccctccgcccccgagtagctgccaccgcctggctgcgccccagcccagtagctcagacgcggccgcatcccggtggactgtagaggcggcagcgagctagagcccgagtcgcagctccgggccgcagagcgctgggcgagcgcgagcgccagggcaccggcagggcaggcagctgcgcgcggctggagtcatgctatactgaaaagacacttcatcaagataactctgggagaagcagaaaaccctgtgccagggacaggaaagataggaatgttgctatgaggacagattcatcaaaaatgactgacgtggagtctggggtcgccaattttgcatcttcagcaagggcaggccgccggaatgccttaccagacatccagagttcagctgccacagacggaacctcagatttgcccctcaaactggaggctctctccgtgaaggaagatgcaaaagagaaagatgaaaaaacaacacaagaccaattggaaaagcctcaaaatgaagaaaaatgaaggctcataatctatcaagagtgctgaatttctgcatgttgaaagacttagtggttctgttttcttgagacatttaatctggtggtaactgtggtaacattgcagccctaagcagcatgtgtatattagataattgtgttgtgatgctactcactttgattgcaatgatgatgtccaaggtaagctattaaaaggcaggttacttccaaatcgcactgaaggaaaaggttaagaataatacatgatcacagaaatgcataccactgtctgtaaacccaacaaaattcactgttctcttttggatttatttagcctgatgtatttttaattcaatttttatggtgatgggcaaatcattcttggtaaatgtaaatcaaacatgattgatttaaaacttcatggaatttgtagaaaattatggacatttttggtgagaaagaacaatagtcaaaactcacatggatagagtgtgtttgttttttgccaaaaatgccccagactttttcccaaacctcaaaaacgtcttggaaaaattgtaaaagtttgataacagaaacatctttaggatatttttgtctgacatattttgcttctagtatgtgcctactgtgatttttttcatgtggaaaatgcaaaatttgtaacaaaatggttatatggaacatgcctattaaatgaattttactatcttccctaactttggtctgtgtatgtgtgtgtgttttactttaatatgaattatacaaaatactagttgttttacactctcttttcttattcttagggcttttgtgtatgtctgacttgtttttaaataacttcctcagcaatgcagaccttaatttttatatttttttaaagtagctaacatagcagtaggcacttaagcatttagtcaatgatattggtagaaatagtaaaatacatcctttaaatatatatctaagcatatattttaaaaggagcaaaaataaaaccaaagtgttagtaaattttgatttattagatattttagaaaaataatagaattctgaagttttaaaaatgtcagtaattaatttattttcattttcagaaatatatgcatgcagttatgttttatttgattgttgacttaggctatgtctgtatacagtaaccaaataaactctttcactattaaagagatttcttactg

SEQ ID NO: 270 - DNA, 2976 bp, Homo Sapiens
attcccacccagtccagaaattgaaatactatcagggggcaagagcctttctctccagctacacactccatctcccgggagcaaggggaaactccgagaggagggcaacagagccagcatcttgccagggccccggaggaggggttccccgctacgcctgtgccggaggagttccagtcaccgagcgaggggcgcaagggtgggtgcatcctgcgctgcggcgggcgcgctacccagacgctggtgtgcagagccacatgaagcctgctggggactgggggccagggagcagcaagccagctgggactgaggcggacgctgtctcagggagacgctgactcgcaaagacactcccttccttgtgcctgggtaaaaagtctcctcctggggtccctggccatcctgaatatccagaatggtgtttctgaagttcttctgcatgagtttcttctgccacctgtgtcaaggctacttcgatggccccctctacccagagatgtccaatgggactctgcaccactacttcgtgcccgatggggactatgaggagaacgatgaccccgagaagtgccagctgctcttcagggtgagtgaccacaggcgctgctcccagggggaggggagccaggttggcagcctgctgagcctcaccctgcgggaggagttcaccgtgctgggccgccaggtggaggatgctgggcgcgtgctggagggcatcagcaaaagcatctcctacgacctagacggggaagagagctatggcaagtacctgcggcgggagtcccaccagatcggggatgcctactccaactcggacaaatccctcactgagctggagagcaagttcaagcagggccaggaacaggacagccggcaggagagcaggctcaacgaggactttctgggaatgctggtccacaccaggtccctgctgaaggagacactggacatctctgtggggctcagggacaaatacgagctgctggccctcaccattaggagccatgggacccgactaggtcggctgaaaaatgattatcttaaagtataggtggaaggatacaaatgctagaaagagggaatcaaatcagccccgttttggagggtgggggacagaagatggggctacatttcccccatacctactatttttttatatcccgatttgcactttgagaatacatctaaggtcatctttcaaaagagaaaaattggacacttgagtgactttgtttttagttttgtttttgtacattatttatgtgattgttatggaattgtcacctggaaagaacaattttaagcaatgtcatttctagatgggtttctaattctgcagagacacccgtttcagccacatctaaaagagcacagtttatgtggtgcggaattaaacttccccatcctgcagattatgtggaaatacccaaagataatagtgcatagctcctttcagcctctagccttcactcctgggctccaaaagctatcccagttgcctgtttttcaaatgaggttcaaggtgctgctttgcatgcctgccaacccatggaagttgtttcttacttcttttctctcttatttattaaccatggtctgagagttgtttttgttctatgtaacagtattgccacaaaactataggcaaatcgtgtttgcagggagatttctgatgcctctgtgggtgtgtgtaagttaaagtggccacatttaagaaggccaagctttgtagtggttgcacagtcacactgatatgctgatttgctctttctcattgtatgtctatgctttgtcatcagtgctatagtaaattacaaagaaataggtagattgtatgaacatacccacaaatgcctatgatttaggttaccaatgtattctttctcatttggggttttgcttctgtctgtctgtttattggaaacttgtacttcaagtagggggaatcctaattctaataactccttagctaagttttattattcaggcaataaacatgttttcatgtaatactggcttactttgtaatttacatctgtaactttcatatttctaaaaggggccaatgcaaaaggagagagaaggactggatttaagccagtttacttagagtatatgataaagaaggcagaggaatagctacatatttggcaattctcctctctgtagtcaccctgacatcctcacaagaaaacaaatctagccattgcccaaactttaaatttgatctctataggtctgcttaaagactcaaattttctccagtttctctcataaattcaattgcaaaagtttctgacaaggctcataccctgtacccttatgcagagcaagcattccatcctaagttataaactacagtgatgtttaattttgaagccaggtctacattatttaattaatggcttcaaaaggtggagatgcactttatttaatgtctttccctagctaattcttactctcaccttaaatatgctttcttgttgcatatatgcacagatacacacacacacacacacgaaaataaataaatgttcatattcttctgttcaacagacatttattttctcctctcccttgaataagaaaataagttttccattcctatgaactgtctaatatctttctattacagaaggggaaactgaggctgggaaaggctaaatgacttatcctccatcagttataacagcccctggtcttcttaaatttaaacacgggacttcccgaactaatttttttaaggatactgaaaaatgagagagagtggtcgaatgcctgaaattttgcttaacttactgtacttaaaatcaattataacttctttttgttactcagggccccactttttgttgctttctagacttgtgtgtagaaagaagattaatgatcacttaaagtagtttccttctttattctgaaaaaatgaggaaaaaataacaacagtggcaaataaaatcatatttggtactaaaa

SEQ ID NO: 271 - DNA, 9355 bp, Homo Sapiens
gcactgtgggtaggcggcggcggcggcggctacgcggagcggcaggcggtggagcgaggccgcgcgcgccgaagatggctgagaagcagaagcacgacgggcgggtgaagatcggacactacgtgctgggcgacacgctgggcgtcggcaccttcggcaaagtgaagattggagaacatcaattaacaggccataaagtggcagttaaaatcttaaatagacagaagattcgcagtttagatgttgttggaaaaataaaacgagaaattcaaaatctaaaactctttcgtcatcctcatattatcaaactataccaggtgatcagcactccaacagatttttttatggtaatggaatatgtgtctggaggtgaattatttgactacatctgtaagcatggacgggttgaagagatggaagccaggcggctctttcagcagattctgtctgctgtggattactgtcataggcatatggttgttcatcgagacctgaaaccagagaatgtcctgttggatgcacacatgaatgccaagatagccgatttcggattatctaatatgatgtcagatggtgaatttctgagaactagttgcggatctccaaattatgcagcacctgaagtcatctcaggcagattgtatgcaggtcctgaagttgatatctggagctgtggtgttatcttgtatgctcttctttgtggcaccctcccatttgatgatgagcatgtacctacgttatttaagaagatccgagggggtgtcttttatatcccagaatatctcaatcgttctgtcgccactctcctgatgcatatgctgcaggttgacccactgaaacgagcaactatcaaagacataagagagcatgaatggtttaaacaagatttgcccagttacttatttcctgaagacccttcctatgatgctaacgtcattgatgatgaggctgtgaaagaagtgtgtgaaaaatttgaatgtacagaatcagaagtaatgaacagtttatatagtggtgaccctcaagaccagcttgcagtggcttatcatcttatcattgacaatcggagaataatgaaccaagccagtgagttctacctcgcctctagtcctccatctggttcttttatggatgatagtgccatgcatattcccccaggcctgaaacctcatccagaaaggatgccacctcttatagcagacagccccaaagcaagatgtccattggatgcactgaatacgactaagcccaaatctttagctgtgaaaaaagccaagtggcatcttggaatccgaagtcagagcaaaccgtatgacattatggctgaagtttaccgagctatgaagcagctggattttgaatggaaggtagtgaatgcataccatcttcgtgtaagaagaaaaaatccagtgactggcaattacgtgaaaatgagcttacaactttacctggttgataacaggagctatcttttggactttaaaagcattgatgatgaagtagtggagcagagatctggttcctcaacacctcagcgttcctgttctgctgctggcttacacagaccaagatcaagttttgattccacaactgcagagagccattcactttctggctctctcactggctctttgaccggaagcacattgtcttcagtttcacctcgcctgggcagtcacaccatggatttttttgaaatgtgtgccagtctgattactactttagcccgttgatctgtctctagtttctttctgttattgcactatgaaaatcagttatattctttaaatttttatcttacttttggataatatccactgcaatactaattgagaaacatgaattatttccaggggcacacaatgctattgaaattactgaaaacaaaatatctgacatcttatttacttgtagaaatctgtaattctattgtgcctatgataaattcacataggcaatatctttaataggttaatatcaatgaagatttttaattacaataatgagttcactacagacgattaacacaccacactggcgaaccatctcaatgtaagggtggtttggcaacacctccttgctttgctgtttggtgtaggtaaatctagtttacttcctaaatttcagtaggctttatgctgtgtttatgcccccaatttattttaacaaaagaagattaaaaagtaaaagaaccacgagtaagatattatttaaatgttgaaatcttaaaaacctgcctccaagatttcagaagccaagtttttctaacagtatttgtacaaatactgcctagtgtattcaacagaaggactgtggtcatgtaacaggtaaccacaattttcaggtttcttaaaaacagctgtaactaactcaggatttttatcttgagatttccctgaataatatatttatcttaagagccttcaagtttcaaattaatattggaacatctggaattgcaacaacttttgtcttttacataaacttacgtcatttaaaaaatgtcttcaaaatctacctttctcaaattctttttgcctctatttatttttgcatttcaccaacagtgataaaatagttaaatgaaacaaagcaaagtatcaacagtcccttaaatgagaatccttatctttgatctttattttctgtgttaggtgttagggtcctggtgcagctcataatgctaattcttcattggaagccactcccttcacctcacctcacctagtcactattgtctttgttcattgtttgatcctgagtggttgattgatatagctttgaatcttttctagtccaagtttgaaaacactgttctggccctaagggctggctatgacctttactgttgaacctgatagggcagggaagctttgaacatcaagaaaaaatttttatcttaaataaataaatatatatattcacacaccagtgcttttaagcaaaaaccagtttttttgtttgtttgttttgctttgtgcaggttttctttaagattaaaaaaacacaaactatagcagggtagataatagtttattgattatattttgttttagtaaaagtatttaattttaaattctgtgtaatttatctaatttgtatttattcatttgttatttttatgttgtaattaacacttatttacctggattaccctaaaaaaattaagctcttgaaaacaaaaaaatgacattaccttgacaggcttctctttgccaaaagtaatgtatgttctgccaagaagcaaatgagaatgttagactaagtttctcctgtgttagtggaaaacaagtgtgtctatctttaaatattctttgaatcaggagtttgcgttgtgtcacatcatatggctttgcagatcttttaaaaactgatgttaaataacttataagtccaacttcttaatatcaagataaatgaatagttcaccaatttgggaaggagggcgggttgcaatttgagatagtttaaggtttaattattgaaagactgccatcttgtggcaccaaaaggtaatttttacatgattatttgtatagtgataagcagtcctgctgtgttagcctggtccattatagatatggcatagttttgggttctctaaatgggtccatacctcttttgggaaaaaacagggccacctcataatatttgcctgattatgaatggaattaccttagaaataaggaactaatcagattacttaaccccaatgacaaaatccacaaaaattttgaaggcagagaaacagaaggaatccagtgatgttttagctccattagtctaataggtcagatattaaaaaattgttcatatcaaaattaccttatatggattattgccatgttttttgagagttaattatttactgttttctaattcttgccagtatttatgaacagctgtagcttgatatttacctactgaattttaggagaactaatggtcacagtttgggttcttttatgtgtatgtttttaaaacagctattttgtgaatctaggtggttggtttttagaagatttcaggagatgcagtccagcacaattagagctggaacattgttacagcaggctttttgttgctcatgggcagatagagggaaagaatcagttgttagccccaaatttccacatttcagtgttgtaaactctgaatgtgataggtagatgtgggctaagaataatttcctccagtgaagacacgggagaagagcttctattatgaggttatagataaggccttagttatatcatggaaatggactccatgtagttctagaactgcatttcccaaagtatatcctgtgagatgctccacagaaaaaatgattgcatggactaagtttgaaaaatgttgcatgctactcttcccctcgaagatgacagtggatgtcagcattaaagactttgacaggtctttctgtgaaaaaaagaaagccacataactttgttgaactttgcccaaattaatttttcattttaaaaaacttaatagcccatgaaaagcaaatttgggaaatacattttttaggaaaatactgtcccagaatgccataattagggtagttaataattaacacttccatttctcttactggttgttgggagaatctgattgaaaattagaattactttgttttaacttgcagacatgttcatcgtgagtgaatgctggattaaatagaattttctgtgtctgcaacttgtttcatgacaccttggttttcttaatcatcttgtattattatttgagtgcaacattattcttatgcatgggtgactgaaaaacctgaaacaagattacttgttaaaaaaaagtctaagagactaatgactcatgcttatggctcagtgggtaatgaatcagtgtcactgattcttacttttaaaatgtgtagtcagtgaacattttctaaatacttttctttgggataccatatgaagatctaattccttatgtttcagtgtaggaacagctaccttctcaaatagaatatgcagggagggaagtaggcaaaccatttacaagttgggtttttgttttgattaacctgttaagagacacttttgtaatctctagtgtttacattcctttatactagctatctataaagagaatccagaaggctaaattaatcagaaataattatatttctatgtcagggtattggctatatgtagcatgaacaattctccattttctgcaaatgggtttttcaggacagttttataattctgagtttgctttttcttattccctagacagtttgtactcagggaatacaaattgatttttactgttaaatgagacatagtttagaaaaaatcataagcaactattgtagatttttgatctgtttggatttatctgtagcattgaataatgtgcagtgtactgagttaatgtaggcacctcactttggatttataaaatgtaaaaacctggaacatgcctgccacagacaccactttgtctattcaccgggtactaatttacatcctattaatggttgtaaaagctgagtgtctaaatgctagacatgttcacaattttgtctgtttttgtttatttgtttttaagacccaaaccttttcaatcttgcatttatttacttggttctcctgtgtcaccctgtggctttttaaatagggaatgtaatttattttaatagtagttctcaaagactctattaaaaactctggacgagggatatgtgcaatctgttggtaagtcacatcctatgtttggcctcatttttataactcctaaaatgagaaaggtagattttaacacttctaaggtacctttgagctttaaagttcttttctgcttttccatatgatttgtgttagtgttcactttttatatatttagagtttttatatgagtgtgaatgtttctgttttgatttggtgaggcatgtcagaggtatatacttgaatatttttctaaatacagctgctggaggaatgcaaatggcaaaaatcatccagaaaaccaaacacggtgaaacatcacatccatttggcatgaagcaaagcattacaaatttggagtgatgaaagtgttccatatattttttatagtgatttttcgatctagagacccttcatattgtttacttactattacgataactttgagaggtaaccagagaaagcatttttgccatttccagatgaggaagcaggaccagaaagctcttcataaagctttaacaccatacaagtatccagcagtgatcaattgctctttataggaaaccacctttcctctggggaagaacagtctgaattaataaaacatcagagtggttgagtagtaaaaataaacacagatgtattgctttcaagtcttagagtgacataaagtagtcttaaataaatagttcttagtttattttaagcagttgattgtactaacgagatgtaattatctgaagtatttatgattagcatattggtttttataagtatttctgagttattgagggtgcttaaaaatgctgaagaaactttaaaacatgattcttcttataattttatgtgattcttatagcacaatcatttttgaaaaaggaaaactaggctgggtgtagtggctcatgcctataatcccagcactttgggaggccaaagtgggtggatcacccgagttcaggagttcgagaccagtctggccaacatggtgaaacctcgtctctactaaaaataccaaaattatccggtgtggtgacaggctgcttgtaatcccagctactcgggaggctgaggcacgggaatctcttgaacctgggaggcagagattgcaataagccaagatcatgccactgcatgccagcctgggtgacagcacaagactgtctcaaaaaaaaacaaaaaaaggaaaaagaaaactagccccagtccctgtctaaattgttatagtttttgactattatctgaattagtcttatccaaatttcatatgcagattgatttttcattttgtatgtatattacatgatataactattttcatagaatatatttctaatttacaaacactgaattattagcttgatagagtttctcccaaaccttataaaactttgaaatgtacttatgtttgagctttaaaaattataaaaacttcatttaaacaagttgctggcatcattactagcctttccacctataattatgatgcatttgatgccactgaacagtaatagcacaaagaacaggtcacacagtctagactggattgagttttaattaaacttcttcatccatagcctgataagaatcaggctgggtctagaagagttatcagactgtaggcctgtattaattttgcaagctaatgttaatgtttactgccagccttgcatagcaatgccagtttgcagttgtgactatgatgtgacttttggtaaaaatggtttatatctaaagtagtttagattttatggaagtggctcttgattgtttggacaagcagggtaggtaaatttcaattacgtttgaagtgtaattaaatcctagaatagagcactctccagaaaaaaaaatgaaaaaagaatttggagaatatcctggcatgaaaacttttttgaataatacgtagaattttgacaaggttcatacagtgcatacagtgtgaccttttctgaggtgggcagggagggttgctacgttgtgttgatttaaaatttcaaggaggaacaaaaacattctagccaaggagaattgcattgttatttttttttctactaatttaaacgtgcatttttcacagttacacatttaagttttgctaccaaaaatggccatttttctagacagataacattttcctaaagtggaagagagatccactgttctaaaaaaaaaaaaaaaaaaaaacactaaattgtgccttctcccttaaattataagaagagtaatagtaaaaacttgtttaaactatattttctttttttctaatccctctcagttctccttagatctgcctcctacaaatgatcatgttgtttgcatctgcctgattgagttcccttggtcaaacctctccctatcactatcagaagttgttcactaaatgtattttcctatttctttcatgttgattgactttataagtcaccttggtaaacataacatttggctaccttctcatgctttataaatgaatttgatgaatggcagtttttatattttaaccctttaaaaagtttgtcaaggaaacaactcagagctaagaacaaaatctaacttggaatcagtttcttcctttggctgctgaagcagcagcaagtcacgtaacctcatttagttttttgatttacaaaatgtggataataacctacctcacagatgtgtgtgagcaactgtttgaaagcccttgtttaaatacagggtttatatccccacattcaatgtaaattcctttttttaaaaaaaataagtatctttgatactgataggatgagtatcttgatttttaggtaagatcacagtttcacaaattgtggtgttgttaggtgacatttaatatttcttgagacctcaagtattcaaatatcaaacttgtcctgtgttgtaacaaatattcagaatctcttaaaatgttggctgaagctgccttaatgtaccaaaatacagctctcaagactgttcacaaatatctgtggttgtacaatgttttgaacatttaatgtaaagttgttgtagaactgtgaactctaaggatagtatctttattgttttaggaagaatggttgtgttctttgtcatgtatgcttaaatatacagtggattttgaatgcaacaaataaaactgaaaacagccatttggttgtgtcatgacaatcataatataggatataatatttactttttttcaaaaacatcctgcattcattcattcttagcatacctttgaaaaagaaaaaaaaatccataggttgatacattgacccattgaagtacttcattacgtatttattgaaaattttttttaattgttgaaattgggaccactttttataattggtttcaagaaaaaaaaatgaacagacttccagtgcttttctgttcaaataaactccgattcaaatttcagttttgtttgttatatactttttgtgagtgttaaatgatatgggaaggatttgtctttcattaaccatatggaaaagatgtcttcctgaattacatagcatttcatagttacagattcttcctaattaatgtttgcaccatatgaaactcataggtaacaaacacaaaggagaaaagcagcctgtctgattgcttataagcttttttcacaaaatcaaattaaaagtctctgattcatttgaaagcta

SEQ ID NO: 272 - DNA, 596 bp, Homo Sapiens
caggaggcggagtggaagtggccgtggggcgggtatgggactagctggcgtgtgcgccctgagacgctcagcgggctatatactcgtcggtggggccggcggtcagtctgcggcagcggcagcaagacggtacagtgaaggagagtgggcgtctggcggggtccgcagtttcagcagagccgctgcagccatggccccaatcaaggtgggagatgccatcccagcagtggaggtgtttgaaggggagccagggaacaaggtgaacctggcagagctgttcaagggcaagaagggtgtgctgtttggagttcctggggccttcacccctggatgttccaaggttcggctcctggctgatcccactggggcctttgggaaggagacagacttattactagatgattcgctggtgtccatctttgggaatcgacgtctcaagaggttctccatggtggtacaggatggcatagtgaaggccctgaatgtggaaccagatggcacaggcctcacctgcagcctggcacccaatatcatctcacagctctgaggccctgggccagattacttcctccacccctccctatctcacctgccca

SEQ ID NO: 273 - DNA, 1257 bp, Homo Sapiens
gagcaggtcgccgctggctggcagtcgccacccggtcccagagtaaataagggagagacactcccgagcgccgtaaatagagtccaagtgggcggagagccgtcccgcgccgcccgctcatgtctctacagagccgactgtccggccgcctggcacagctgcgcgcggcggggcagctgctcgtccccccgcgcccccggcccggacacttggcgggtgccacgaggacccgcagcagcacgtgcggtcccccggcgttcctgggcgtgttcggccgccgtgcgcggacctcggcgggagttggggcgtggggggcggcggcggtggggcggacagccggggtgcgcacttgggcccccctggccatggcggcgaaggtggacctgagcacctccaccgactggaaggaggcgaaatcctttctgaagggcctgagtgacaagcagcgggaggaacattacttctgcaaggactttgtcaggctgaagaagatcccgacatggaaggagatggcgaaaggggtggctgtgaaggtggaggagcccaggtataaaaaggacaagcagctcaatgagaaaatctccctgctccgcagcgacatcaccaagctggaggtggacgccatcgtcaacgccgccaacagctccctgctcggaggcggtggcgtggacggctgcattcatcgggccgccggccccctgcttaccgacgagtgccggaccctgcagagctgtaagactggcaaggccaagatcaccggcggctatcggctcccggccaagtacgtcatccacacagtggggcccatcgcctacggggagcccagcgccagtcaggctgccgagctccgcagctgctacctgagcagtctggacctgctgctggagcaccggctccgctcggtggcgttcccctgcatctccaccggcgtgtttggctacccctgtgaggcggccgccgagatcgtgctggccacgctgcgagagtggctggagcagcacaaggacaaggtggaccggctgatcatctgcgtgttcctcgagaaggacgaggacatctaccggagccggctcccccactacttccccgtggcctgaggctcccgcagcccaccctgaccgggactgacccgccttcgggaccccgctcccagctctgagaggtcgccaaagcctgcagcctggcctgggcctggccaccccttctttccctccgcgccccgcccccgaggagcctaataaagatctcgttgtggca

SEQ ID NO: 274 - DNA, 8064 bp, Homo Sapiens
gtttgtggggcgtgggcagccgtgctggcgtggggagtcccgctgccagtttgcacacagcgccgtggagatggctgtgtgggaggccgagcagctgggtggcctccagcggggggacctgctcacaccccctgcccctgatggcgacgggcgcacggccccccttggccagccccctggggcccagctgtactgcccggcctgcttggtcacctgccactctcaggaggccttcgagaaccactgcgcatcctcggagcacgcacagatggtggccttcgaccaggccctgccctgggagcaccgttccccacccccgggactctccaagttcgagctctgcccaaagcctgacctctgtgagtatggggacgcctgcaccaaggcacactcagcacaggagctgcaggagtgggtccggcgcacgcaggctgtggagctgcgggggcaggcggcctggcaggacgggctggtgccctaccaggagcggctgctggccgagtaccagcgcagcagcagtgaggtccttgtgctggcagagacccttgatggagtgcgtgtcacctgcaaccagcccctgatgtaccaggcccaggagaggaagacccagtacagctggacgtttgccgtccactctgaggagcccctgctacacgtggccctgctgaagcaggagccaggagccgacttctctctggtggctcccggcctcccgccaggccggctctacgcacggggtgagcgcttccgtgtgcccagctccactgccgacttccaggtgggagtgcgtgtgcaggctgcctcgttcggcacctttgagcaatgggtggtcttcgactttggccgccggccggtgctgctacaaaagctggggctgcagctgggccaggggcgtcgcccaggaccctgcaggaatctggcgctcggccaccctgaggagatggagcgctggcacactggcaaccgccacgtggtgcctggcgtggagcggacggccgagcagacggccctgatggccaagtacaagggccctgccctggccctggagttcaaccgcagcagcgtggcctcgggccccatctcaccaaccaactatcggcagaggatgcaccagtttctctatgaggaggaggcggctcagcagcagctggtggccaagctgaccctgcggggccaggtgttcctgaagacggcattgcagacgccagcgctgaacatgctcttcgcgcctccgggagcactgtacgcagaggtccccgtcccctcctccctgatgccagacacagaccagggcttcctgctgggccgggcggtcagcacagccctggtggcccctgtacctgcacccgacaatacggtgttcgaggtgcggctggagaggcgggccagctcagagcaggcgctgtggctgctgcttccggcccgctgctgcttggccctggggctgcagcctgaggcccgcctggtcctggaggtgcagttccagattgacccgatgaccttccgcctctggcaccaggcagtggacacactgcctgaggagcagctggtggtgcccgacttgcccacctgcgccctgcccagaccttggtctgtcccacccttgcggcgtggcaaccgcaagcaggagctggccgtggcgctcatcgcgggctggggccctggggatgggaggcgtgtccccccgctactcatctatggcccctttggcaccggcaagacctacacgctggccatggcctccctggaggtcatccggaggcctgaaaccaaggtgctcatctgcacacacaccaacagtgccgccgacatctacatccgggagtatttccacagccacgtcagcggcggccaccccgaggccactcctctccgtgtgatgtacacggaccggccgctgagccagacggacccagtcacgctgcagtactgttgcctgaccgacgaccgccaggctttccgcccgcccacacgggcagagctggcgcggcaccgcgtggtggtcaccaccacctcccaggcccgtgagctcagggtgccggtcggcttcttctcccacattctcatcgatgaggcggcccagatgctggagtgcgaggccctcaccccgctggcctatgcctcgcacggcacccgcctcgtgctggcgggcgaccacatgcaggtcacaccccggctgttcagtgtggccagggcccgggcggccgagcacacgctgctgcaccgcctcttcctgtgctaccagcaggagactcacgaggtggcgcggcagagccgcctggtcttccacgagaactaccgctgcacggacgccattgtcagcttcatctcgcggcacttctacgtggccaagggcaaccccatccacgccaggggcaaggttccgccccacccccggcactacccgctcatgttctgccacgtggcgggcagcccagaccgggacatgtccatggcgtcctggctgaatctggctgagattgcgcaggtcgtcgagaaggtgcaggaggcctacaacacctggcccagctgctggggcggccgcgagcagaggtgcatctgtgtcgtttcccacggtgcccaggtcagtgcactgaggcaggagctgaggaggcgggacctaggccaggtgtctgtcggcagttttgagatcctgccagggcggcagttccgggtcgtggtgctcagcactgtgcacacctgccagagcctgctcagccctggggcactggcccctgagttcttcaccgacgcccgcgtgctcaacaccgtcctgacccgcgcccagtcccagctggtggtagtgggggacgccgtggccctctgctccttcggggcctgcggcaagctctgggagagcttcatccgtgagtgcgtggagcggcacagtgtctgccccgagggcctgtccatggagcaggtcgagcagggtgtggcgcagagacggcgctggcctccccgaggcacacaggctggggcagcggggaactgggaggctgccccagagccagtaggggacctggccgaggagcaggcggctgtggtgacggccatggtgaaggcagagccgggagatgaggctctgagcccagcatcccgtgacatcacggcaaccacagcgcagacggaggctgcggcagcaccagcaggagacgcagtgaaggaagacgtggtgcccggggcctgtgcggcaggagcggctgctgcagcgggcgtggagtccacggaggctgaggatgcagaggctgacttctggccgtgggacggggagctcaacgctgacgacgccatcctacgggagcttctggacgagagccagaaggtgatggtgaccgtcggggaggacgggctgctggacactgtcgccaggcccgagtccctgcagcaggcccggctgtacgagaacctgcccccggctgcgctacggaagctgctgcacgcggagcccgagcggtaccgccactgctctttcgtgccagagaccttcgagcgggcgtcagccatcccgctggacgatgcctcctcgggccccatccaggtcaggggccgcctggactgtgggatggccttcgccggggatgaggtgctggtgcagctcctttcgggagacaaggcgcccgaggggcggcttcggggccgcgtgctgggcgtgctgaagaggaagaggcacgagctggcgtttgtgtgccgcatggacacgtgggacccgcgcatcatggtccccatcaatggctccgtgaccaagatcttcgtggccgagctgaaggacccatcgcaggtccccatctacagcctccggaagggccggctgcagcgtgtggggcttgagaggctcaccgccgaggcccggcacagccggctcttctgggtccaaattgtcctgtggcggcaaggcttctactacccgctgggcatcgtccgggaggtgctgcctgaggccagcacctgggagcagggcctccgcatcctcggcctggagtacagcttgagggtgcccccgtcggaccaggccaccatcaccaaggtgctgcagaaataccacacggagcttggccgggttgccggccgccgagaggactgccgcgccttcttgaccttcactgtggacccccagggcgcctgcaacctcgatgatgccctcagtgtccgagacctgggtcccaggtgcgaggtggctgtgcacatcactgatgtggccagcttcgtgcccagggacggggtgctggacgtggaggcgcgaaggcagggcgctgcgttctatgcccccggcagggagccagtgcccatgctgccggccagcctctgccaggacgtcctcagcctcctgcctggccgggaccgcctggccatctccctgttcctcaccatggagaaggccagtggccagctgaagagcctgcgctttgcaccctccgtggtccagtctgaccgccagctgtcctacgaggaggcggaggaggtgatcaggcagcacccgggtgccggccgtgagctgccggcccgcctggactccgtggacgcctgcgtcgtggccgcgtgctacttctctcggctgctgcgccggcaccgcctgcggtccgactgcttctatgagcagccggacgaggacggcaccctgggcttccgcgcggcccacatcatggtgaaggagtacatgattcagtttaataggctcgtggctgagttcctggtgggcagcgagtgcacgcggacggtcacgcctctgcggtggcagccagcaccccgcagccagcagctcaaggccctgtgtgagaagcatggggaccgggtgcccctgtcactgcacctcggccaccacctgcacggcggcgggggcagtccccccgacacgcggctgcacctcctggcctccctctggaagcaggtccagtttgctgcccgcacccaggactacgaacagatggtggacttggtcaccacggacgacatgcacccattcctggctcctgcaggccgcgacctccgcaaggccctggagcgctcggcgttcggccgctgcgcccggggccaccagcagcagggcggccactactcgctgcaggtggactggtacacgtgggccacctcgcccatccgcaggtacctggacgtggtgttgcagcggcagatcctgctggcgctgggccatgggggctctgcctactctgccagggacatcgatgggctctgccaggccttcagcctccagcacgcacttgcccagagctatcagcggcgggcgcgcagcctgcacctggccgtgcagctcaaggcccagcctctggacaagctgggcttcgtggtggacgtggaggcgggctcccgctgcttccggctgctcttccccagcaaccgggagacgctgcctgacccctgccccgtcccctacggctccctgcagctggccgagcacccccacgccctggcaggccggccgggcctgcggctcctgtggcggcgccgtgtctactcagcgcagggatccagcccgcccctgccactgcctggcactgtgccggacccacacaccctggccgtggagacggccctgtggaagcagctgctggagctggtggagctgcagcgctggccggaggcggctgctctcatccaggagaagggcgaggcgtcccagcggcgggagctggtgcaggtgcagcggagccactgtggccatttcctggaggtggcccgggagctgggcagtggggacaccctgcaggtgcagctcggcaccagcctgcagcacggcttcctggtaccgagccctcagctctggacggtggcaccgggcttcagcctctgcctggagcacgtggagcggcccggagactgcttctcaggccgtgtgtaccgggccccgagggaccggtaccgcgacgtggatgagtacgcctgcgtgtgggaaccattctgcgccctggagtcggccaccggcgcggttgccgagaatgactccgtcacacttcagcacctgagtgtctcctgggaggcgtcacggacgccgcaggggcagctgcagggcgccttccgcctggaggccgccttcctcgaggagaactgtgccgacatcaacttcagctgctgctacctctgcatccggctcgaggggctgccggctcccacggccagcccacgccctgggcccagcagcctcggccctggcctgaatgttgaccccggcacgtatacctgggtggcccacgggcagacgcaggactgggaccaggagcgccgggcagaccggcaggaggctcccagacgggtgcacctcttcgtccaccacatgggcatggagaaggttccggaagaggtgctgaggccgggcaccctgttcaccgttgagctgctgcccaagcagcttcctgatctccgcaaggaggaagccgtgcgtggactagaggaggcgtccccgctggtcaccagcatcgcactgggccggcctgtcccgcagcccctctgcagagtgatccccagcaggttcctggagcggcagacctacaacatccccggaggccgccacaagctgaaccccagccagaacgtggcggtcagggaggctctggagaagcctttcacggtcattcagggcccaccaggtacagggaagacgatcgtgggcctccacatcgtattctggtttcataaatcaaaccaggagcaggtgcagcccggaggccccccccgtggggagaagcggctggggggtccctgcatcttgtactgcggcccctccaacaagtcggtggatgtcctggcaggactgctcctgagaaggatggagctgaagcccctccgtgtgtacagtgagcaggctgaggccagcgagttcccagtgccgcgtgtgggcagcaggaagctgctcaggaagagcccccgggaggggaggccgaaccagagcctcaggagcatcaccctgcaccaccggatccggcaggcccccaacccttactcgtcggaaatcaaggcctttgacacccggctgcagagaggggagctcttctccagggaggacctggtctggtacaagaaggtcttgtgggaggctcggaagttcgagctggaccggcatgaggtcatcctctgcacctgctcctgtgcagcctctgccagcctcaaaatcctggacgtgaggcagatccttgttgacgaggcaggcatggccacggaacctgaaaccctcatccccctggtgcagttcccacaggccgagaaggtggttcttctcggagaccacaagcagctgcggcctgtggtcaagaatgagcggctgcaaaacctgggtctggaccggtctctgttcgagcggtaccacgaggacgcacatatgctggacactcagtaccgcatgcatgagggcatctgtgccttcccctctgtggcgttctacaagagcaagctgaagacgtggcagggcctgaggaggccgcccagtgtcctgggccacgctggcaaggagagctgccctgtcatctttggccacgtgcagggccacgagcggagcctgctggtgtccacggacgaagggaatgagaactccaaggccaacctggaggaggtggctgaggtggtccgtatcaccaagcagctgaccctggggaggaccgtagagccccaggacatcgccgtcctcacgccctacaacgcgcaggcctctgagatcagcaaggcccttcggcgagagggcatcgccggggtggccgtgtcctccatcaccaagagccaggggagcgagtggcgctatgtgctggtgagcaccgtccgcacctgtgccaagagcgacctggaccagcggcccaccaagagctggctcaagaagtttctgggcttcgttgtggaccccaaccaagtgaatgtggctgtcacgcgggcccaggaggggctctgcctgatcggagaccacctccttctgcgctgctgccccctctggcgtagcctcctggacttctgcgaggctcagcagaccctcgtgcctgccggccaggtgcgcgtctgcaggaggccaactatgccttcctgaagagccctctccacctgcaaggtgccaggactgggagggaaagt

SEQ ID NO: 275 - DNA, 2239 bp, Homo Sapiens
tctgttcccacttcctccccgccccaggaaacctgccatggcctcctggtgagctgtcctcatccactgctcgctgcctctccagaaccttggtgtgaacttaggtcttggcgtcgggatcccttttcgtcacactcaggtgacctacagggagctccgctcgacactgcaaggcttagaccagttcggtccaacagagaaagcaggcaaccaccatgtcatttgaaaacagtttcatcgggatataattcgcaacccatacagtgaatccatttaagatactctgacccatggatcccctgggtgcagccaagccacaatggccatggcgccgctgtctggccgcactgctatttcagctgctggtggctgtgtgtttcttctcctacctgcgtgtgtcccgagacgatgccactggatcccctagggctcccagtgggtcctcccgacaggacaccactcccacccgccccaccctcctgatcctgctacggacatggcctttccacatccctgtggctctgtcccgctgttcagagatggtgcccggcacagccgactgccacatcactgccgaccgcaaggtgtacccacaggcagacatggtcatcgtgcaccactgggatatcatgtccaaccctaagtcacgcctcccaccttccccgaggccgcaggggcagcgctggatctggttcaacttggagccaccccctaactgccagcacctggaagccctggacagatacttcaatctcaccatgtcctaccgcagcgactccgacatcttcacgccctacggctggctggagccgtggtccggccagcctgcccacccaccgctcaacctctcggccaagaccgagctggtggcctgggcggtgtccaactggaagccggactcagccagggtgcgctactaccagagcctgcaggctcatctcaaggtggacgtgtacggacgctcccacaagcccctgcccaaggggaccatgatggagacgctgtcccggtacaagttctacctggccttcgagaactccttgcaccccgactacatcaccgagaagctgtggaggaacgccctggaggcctgggccgtgcccgtggtgctgggccccagcagaagcaactacgagaggttcctgccacccgacgccttcatccacgtggacgacttccagagccccaaggacctggcccggtacctgcaggagctggacaaggaccacgcccgctacctgagctactttcgctggcgggagacgctgcggcctcgctccttcagctgggcactggatttctgcaaggcctgctggaaactgcagcaggaatccaggtaccagacggtgcgcagcatagcggcttggttcacctgagaggccggcatggtgcctgggctgccgggaacctcatctgcctggggcctcacctgctggagtcctttgtggccaaccctctctcttacctgggacctcacacgctgggcttcacggctgccaggagcctctcccctccagaagacttgcctgctagggacctcgcctgctggggacctcgcctgttggggacctcacctgctggggacctcacctgctggggaccttggctgctggaggctgcacctactgaggatgtcggcggtcggggactttacctgctgggacctgctcccagagaccttgccacactgaatctcacctgctggggacctcaccctggagggccctgggccctggggaactggcttacttggggccccacccgggagtgatggttctggctgatttgtttgtgatgttgttagccgcctgtgaggggtgcagagagatcatcacggcacggtttccagatgtaatactgcaaggaaaaatgatgacgtgtctcctcactctagaggggttggtcccatgggttaagagctcaccccaggttctcacctcaggggttaagagctcagagttcagacaggtccaagttcaagcccaggaccaccacttatagggtacaggtgggatcgactgtaaatgaggacttctggaacattccaaatattctggggttgagggaaattgctgctgtctacaaaatgccaagggtggacaggcgctgtggctcacgcctgtaatcccagcactttgggaggctgaggtaggaggattgattgaggccaagagttaaagaccagcctggtcaatatagcaagaccacgtctctaaataaaaaataataggccggccag

SEQ ID NO: 276 - DNA, 2178 bp, Homo Sapiens
acacagggctcggcggcaggtgcctcgtcgcgcacactcgcgggccgcggggaccggctcgggcgcggggccggctggggcggggcggggcggcggcgcgcgttccccgccggccacaccggccgccctgcactcggcgaggggcgtgtgcgcgggcctggcacccgcgggccccatgttcaccgagctgaggtccaagctgagccccccgcgtggccgcgccggggccgtgcgcgcgggcttcggggagcgccgggatgtggacgccactgcccacttcagcttctgccggaccctcctggagcacacggtgtcagctgagagcatcccctgccacttgcctcggacacctggcaccagcctcacgtggcatgactcccgcagccagagggcggccagcagcaggccaatcaagctcctgcagcagcccggcacagacaccccccagggccggctgtactctgaccactatggcctgtaccatacaagcccctcgctgggtggcctgacccggcccgtggtcctgtggagtcagcaggacgtctgcaagtggctcaagaagcactgtccccacaactacctcgtctacgtggaggccttctcccagcatgccatcaccggccgggcactgctgcggctgaatgcggagaagctgcagcggatggggctggcccaggaggcccagaggcaggaggtgctgcagcaggtgctccgcctgcaggtgcgtgaggaggggcggagcctgcagctgctcagccaagcttccttcgggaaaatgtcctagctgctgctgaggcttgaacccagaccccagcactgtgatgggagtccacggctagggaggaggccaagctggccccgcagcgcctcttggaccctgcgggatgccggggcggccaggctggcccaacggacagacaggaccaggatcacacctccaggcgcctctggttggacattccaggtcgtgccctggggctgggtgggtagggggctgcttgagtgtggccccacctcctgggacctgagcccaagccctcccctggtgcagctggcagcatgtggggcagctgcctggagccagaaccggtttggatgtcccccctagactcccagggagtctgtttatttacattcccctctccacgtgatgtcggtcccccatcgcctgctgagtcacttgtctgtccacccacccagcccagttctaggtcgttccccagcacctccaggttggcccacacaggtaccataagctgcctcggctccctgtggcttgtgcccatgcacctgccagggcccagcaggccaacccatcatctagagtagtggccatcagcacccgcctaacgggcaccatgccaagcactttcatcattatttatacatcgtcaccacaccccctctattcatgagaagtaaagctgagaaaggaccagattgaccaagcgccagagacaaaatgtggcacaacgagaaccccagccctgtccaggtggctccgcgcccagggcccaggcttagcagtgctccctgccctatctttgggaaaatcttgcttttatggtcttcccccctcgccctcaagaacaagggccttgtgcgtgggccttcccattgctgctttcccaagaaggcctggattcaggggagaggccttcccagggccactccccttacaccctcccagaggcctgagcaacccctctctgggtggtttggggctggtgctgcctggcggaaggacagtgagggcggccctagccgcctccaccctcttgcgcctctgccctctcccagtccccctgtggcttctgaaaatctcagggacagatgaggctgagcccctagtcccctctgtgtgctttgagcctccagactcgaggctggtcactgcaggtcccaggtggaatttggacaactggcctggccgctcccatcctgtaagcccccaccacggggagaccctcatccctgcccctgtgtggctgcgcaagtattctgcccgcctcccaccatcagccttcgcccaaggggcccttctgcctctgcttccctcccttctcctctgtcttgccctggcccacgcacgcctgtctcgtcttccttgttttgctgcactcacttttttatactctgacaaaaaaaaaaaatcagaaataaagctggttcccaagt

SEQ ID NO: 277 - DNA, 879 bp, Homo Sapiens
cccgaccagaggagggcggtgctgcagggctggtccgggaggtgacgaccggcttcggagagtctatcatggcagctcggactggtcatacggccttgagaagggtagtctcgggatgccgtccgaagtcggcgacagcggccggggcgcaggcgcccgtgcggaatggcagatattcaatgcaggaaatgtatgatgtagtatcgggagtggaggattacaagcattttgttccttggtgcaaaaaatcagatgttatatcaaagagatctggatattgtaaaacaagattagaaattggatttccacctgtgttggagcgatatacatcagtagtaaccttggtgaaacctcatttagtaaaggcatcttgtactgatgggagacttttcaatcatttggagactatttggcgttttagcccaggtcttcctggctacccaagaacttgtaccttggatttttcaatttcttttgaatttcgatcacttctacattcccagcttgccacactcttttttgatgaagttgtgaagcagatggtagctgcctttgaaagaagagcatgtaagctgtatggtccagaaacaaatatacctcgggagttaatgcttcatgaagtccatcacacataaaggcaaaaaagaactggtgccacctgcttctgactttagtttgttcacttttaggaagtattttcatgacatgttttcagaagccagaaagcatttgttaaacgcagctttggttataaacctgcaccattgaaaatttgcacatagaatatagactcacttgtacatagaattatttcttcaagtataattcaaaataatatggacattatcatgttctgcattacaataatgggatgtcatc

SEQ ID NO: 278 - DNA, 1952 bp, Homo Sapiens
gaacacgcccgcgccgctgactggcgggtggggttgtcgacacgttcaacccgttctgctggctcgagaacgaagtaggccgtctcgctctgggtctccaggcccgcgaccgtccgccagtcgtcccgaggcatgaagaactcttgactgacagaaacggagggtgtgtccaaagttttgaggacggccgagcggcgctccaaaacccgtcctcacagcctcgccccgttcgcctcagctacaacaaatcatcgtcaacctgttccaccttctccagtctggtagcaaaaaggggtgtctcagaatctccggcctgtgaaactgtgaggggattcggccaagacgtcctcttccctctgcctcccacccaggccactcttcacctccaccatgagcctggacatccagagcctggacatccagtgtgaggagctgagcgacgctagatgggccgagctcctccctctgctccagcagtgccaagtggtcaggctggacgactgtggcctcacggaagcacggtgcaaggacatcagctctgcacttcgagtcaaccctgcactggcagagctcaacctgcgcagcaacgagctgggcgatgtcggcgtgcattgcgtgctccagggcctgcagaccccctcctgcaagatccagaagctgagcctccagaactgctgcctgacgggggccggctgcggggtcctgtccagcacactacgcaccctgcccaccctgcaggagctgcacctcagcgacaacctcttgggggatgcgggcctgcagctgctctgcgaaggactcctggacccccagtgccgcctggaaaagctgcagctggagtattgcagcctctcggctgccagctgcgagcccctggcctccgtgctcagggccaagccggacttcaaggagctcacggttagcaacaacgacatcaatgaggctggcgtccgtgtgctgtgccagggcctgaaggactccccctgccagctggaggcgctcaagctggagagctgcggtgtgacatcagacaactgccgggacctgtgcggcattgtggcctccaaggcctcgctgcgggagctggccctgggcagcaacaagctgggtgatgtgggcatggcggagctgtgcccagggctgctccaccccagctccaggctcaggaccctgtggatctgggagtgtggcatcactgccaagggctgcggggatctgtgccgtgtcctcagggccaaggagagcctgaaggagctcagcctggccggcaacgagctgggggatgagggtgcccgactgctgtgtgagaccctgctggaacctggctgccagctggagtcgctgtgggtgaagtcctgcagcttcacagccgcctgctgctcccacttcagctcagtgctggcccagaacaggtttctcctggagctacagataagcaacaacaggctggaggatgcgggcgtgcgggagctgtgccagggcctgggccagcctggctctgtgctgcgggtgctctggttggccgactgcgatgtgagtgacagcagctgcagcagcctcgccgcaaccctgttggccaaccacagcctgcgtgagctggacctcagcaacaactgcctgggggacgccggcatcctgcagctggtggagagcgtccggcagccgggctgcctcctggagcagctggtcctgtacgacatttactggtctgaggagatggaggaccggctgcaggccctggagaaggacaagccatccctgagggtcatctcctgaggctcttcctgctgctgctctccctggacgaccggcctcgaggcaaccctggggcccaccagcccctgccatgctctcaccctgcatatcctaggtttgaagagaaacgctcagatccgcttatttctgccagtatattttggacactttataatcattaaagcactttcttggca

SEQ ID NO: 279 - DNA, 1854 bp, Homo Sapiens
cgcttcgcacaggagcagaggggtcagggcgaagtcccagggccccaggcgtggctctcagagtctcaggccccgaaggcggtgtatggattggggagtcccagccttggggattccccaactccgcagtttcttttctccctctcccaacctacgtagggtccttcatcctggatactcacgacgcggacccagttctcactcccattgggtgtcgggtttccagagaagccaatcagtgtcgtcgcggtcgctgttctaaagcccgcacgcacccaccgggactcagattctccccagacgccgaggatggccgtcatggcgccccgaaccctcctcctgctactctcgggggccctggccctgacccagacctgggcgggctcccactccatgaggtatttcttcacatccgtgtcccggcccggccgcggggagccccgcttcatcgccgtgggctacgtggacgacacgcagttcgtgcggttcgacagcgacgccgcgagccagaggatggagccgcgggcgccgtggatagagcaggaggggccggagtattgggaccaggagacacggaatgtgaaggcccagtcacagactgaccgagtggacctggggaccctgcgcggctactacaaccagagcgaggccggttctcacaccatccagataatgtatggctgcgacgtggggtcggacgggcgcttcctccgcgggtaccggcaggacgcctacgacggcaaggattacatcgccctgaacgaggacctgcgctcttggaccgcggcggacatggcggctcagatcaccaagcgcaagtgggaggcggcccatgaggcggagcagttgagagcctacctggatggcacgtgcgtggagtggctccgcagatacctggagaacgggaaggagacgctgcagcgcacggacccccccaagacacatatgacccaccaccccatctctgaccatgaggccaccctgaggtgctgggccctgggcttctaccctgcggagatcacactgacctggcagcgggatggggaggaccagacccaggacacggagctcgtggagaccaggcctgcaggggatggaaccttccagaagtgggcggctgtggtggtgccttctggagaggagcagagatacacctgccatgtgcagcatgagggtctgcccaagcccctcaccctgagatgggagctgtcttcccagcccaccatccccatcgtgggcatcattgctggcctggttctccttggagctgtgatcactggagctgtggtcgctgccgtgatgtggaggaggaagagctcaggtggagaaggggtgaaggatagaaaaggagggagttacactcaggctgcaagcagtgacagtgcccagggctctgatgtgtccctcacagcttgtaaagtgtgagacagctgccttgtgtgggactgagaggcaagagttgttcctgcccttccctttgtgacttgaagaaccctgactttgtttctgcaaaggcacctgcatgtgtctgtgttcgtgtaggcataatgtgaggaggtggggagaccaccccacccccatgtccaccatgaccctcttcccacgctgacctgtgctccctccccaatcatctttcctgttccagagaggtggggctgaggtgtctccatctctgtctcaacttcatggtgcactgagctgtaacttcttccttccctattaaaattagaaccttagtataaatttactttctcaaattcttgccatgagaggttgatgagttaattaaaggagaagattcctaaaatttgagagacaaaataaatggaagacatgagaaccttccagagtcca

SEQ ID NO: 280 - DNA, 7932 bp, Homo Sapiens
ctccccctcctctgcatcctcgccgctctccctctctcctcgcccgctgggtgctgaagttgggcggatggcagcaaaccggctccgctagaggaccgagccgcccagccccgctcccccggacccatcggcgcgctgcccacacctccaggcgaccggccaactgggtcctgaagtagctgaaatgcgaaaaaggcagcagtcccaaaatgaaggaacacctgccgtgtctcaagctcctggaaaccagaggcccaacaacacctgttgcttttgttggtgctgttgttgcagctgctcctgcctcactgtgaggaatgaagaaagaggggaaaatgcgggaagacccacacacactacaaaaatggagagtatccaggtcctagaggaatgccaaaaccccactgcagaggaagtcttgtcctggtctcaaaattttgacaagatgatgaaggccccagcaggaagaaaccttttcagagagttcctccgaacagaatacagtgaagagaacctacttttctggcttgcttgtgaagacttaaagaaggagcagaacaaaaaagtaattgaagaaaaggctaggatgatatatgaagattacatttctatactatcaccaaaagaggtcagtcttgattctcgagttagagaggtgatcaatagaaatctgttggatcccaatcctcacatgtatgaagatgcccaacttcagatatatactttaatgcacagagattcttttccaaggtttttgaactctcaaatttataagtcatttgttgaaagtactgctggctcttcttctgaatcttaatgttcatttaaaaacaatcattttggagggctgagatgggaaataaaagtagttaaataacatcagaaactgagttcctggagaactacagtttagcattcctcaggctactgtgaaaacacaaccgttatggtctttgtctccatttttatcaaggttttccatggttaagtttggagaaaataccacacaaaacaatgaattgccaaattgtttgttttattcaagactcattctacttgcaagcaaagtgtatttgtagtcctatgaacagtctcctcgtgtatctccagagactgcatgtgcaaagtaaaatgcttcatttgccacatagttgttgtaatatttaatccagtagcataacttatatctgtatttaaggacttttgtgcaatatggtcttaagaaataattgccaaaaaaatcggccatggtttgcattttttaacataatctaagacagaaaaaaagcaatttttactatgtaacaatggtattcaacattctatatactgtgtttagtacactaattttgaagccaatatttctgtacatgaaaaagagctatttatctctgtttgttggaaaatcctaatggggattcctctggttgttcactgccaaaactgtggcattttcattacaggagagtttactatgctaaaagcaaaaaacaaaaaaaaaaaaaaagggaagaaggaaaaaagcacaaaacaatttgaagatatcctatctcaatgacaaatcaaaagagtgatattgcttttaactgtaatagaagaaaatgaatttatgtatatatcagatgtccaatactgtaattaatttattaaagactggctctccagttttaaaatggttgtgtaaagttatgtacttcagcaagaaaaaaataataataagcttgataacttagttttggaatataaagaaaaggacttaataaaggaatgcctacatgtagcactgtaaaacattttgatgaatagcatctgtcctgtggcatattttccttgaaagtgaaatccaatgaaaagctaagtttttaccaggaaaagttttataagggttatgaagaaaataatcctctacttcagaccttaactgttttcacataatatcttaaggatgacattttaaagatgtttaaaccaaactattagttttcatccatcattaaaaggcagtacagtgctcaaatcttccagctgccatattattttttataagtacactaaatctttacgacaaaacacttgcctgacattgtcatgtacttctgaccttcaaggaaacaatattctgtcatgcataaaagtgataattaaaataatcagtgtcatatttatatcaaagtgttacatttgaatattaatatcccctgaagactatttttttaatattaaactgaatgaatataatactgagtaacctaaaatgaaagttttaaaaagatttatatccactgagaacactggccttatattaaggatgatattacagttacaggttttctttgtcatttttttaactacctctcattttttaatttattaaacatattttttaaaaaaacaagtttgggggtttctttttaaatttattttacttgaaaggttggcatcacaagtttctttttccataaacttaaaacatttcaaaaatggtttttttaagcaagtatgattttctaatttatatagaattcaggagacatgaataaaagggctattatctattccctatgcaaatattttaactgttgcagtgtttgacaaaatgggattttttaaaaattgcagagtagaaaacaaaatattctgtttacactggcgttgctgactatcctaccatattcagcacttttaaatacgttatttatgaaaatgcagttaaaatgcaagatagaaaatatttataataatcatttcttttaacaaatgcctgtgttttctgaaagtgttagtgtgttaagacatattttattcatgtcatttaaatactatttgaataagttttcagtaatatgttgaaaaaaagatagctatgaagatgtttacaaaaagtcatattttttcctaaagagtaaagaaaaacctaaaagaatcatcacttctattgtgaagttctattgttcctaaattatttaatttttttcttgcttagaattgagtttattatgctactatgatatatacacatgtatggtgtagtatcatatttgtttctgtgtgtgaggctcaacaaattggtgcacatgactagaaaatatgtaatatactgtgatacactgcatgcatccatctttttaaatgtagactttatattctcgttgttactatatatgatggtgacctgctagtcataagttatctttataagatactttggactattagatgaattgtctgtttgacaatatctttaatattttaccaaatgtaaaagataagggccgttataaagagtcctaatctctaacctgggcatttgtagaacacagattttaaagttggtatatccttttgaaacctgatgaggaagttgagttaaaaaagattcgagagcagatttacacatcagatgttgataaccatgctatgtgagcatttctgtgctaaactcgtatttttgggtgaggggagggtttctcatttaagagtatgtctgtatatttgcaactctactaattttctaagtatgatataattccttctgtttaagttacagagctattataaataaacaaaagagccttcaactggtgtctatgctaccattccaagagcacaatatttgttttcttagaatttgagttttcctagtgagtaaattcctccctggggaaaaattagcactttaaaatggacactttgtgttttcaattgccaaggtatctttgtatactattagaatttgctgatgcacacagaaagagattaatgcactttctatagtgcctaactttagatgtatctataaaagaaagtagaggatacagattatgtatatataaataaattggagagccagatttcttcagagattgatcttgtacattaatcacaccagtaatggatggatggcacttctttactcgggctgttatgatgttatccaaaggtagtagagatgctctgacagtgttggagtgtgcacatgaacaacaagagcaaaacacaactttgatactaaagttacgaaatgcagaagtcaagaccataatgtgatgttttttttttttgaaatcttaaaatatgtacatagaatgaccagttctgatatgccgtcttagtgcatggatgtttattagtatcctttaatgctgcctaggttctgacttacagaatgaaatacgtgttgtttatctacctgatagttcagttttgccaaaggactatagggataagtgaataatatttatttattaggagcaaaaatacattttcatcccattaagctaatttaaaataatgcctgatttttacttttgagtttatccatttttctatacctttaacttatttatactttaaaaaatcatattgtaattgtgacaaattatatctcaaaaaataccaattattagatgctttggtgttgaaatgtaaaagagaaggaatttaaaatacaatcaaaaaagtcaaaaataaaacgtatttgaaaaccacctaaaatttcttggccaggcacagtggctcaagcctgtaatcccagcactttgggaagccaaagagggcggatcacttgagctcaggagtttgagaccagactggccaacatggtgaaaccccgactctagtaaaaatacaaaattagccgggcatggtggtgggtgcctttaatcccggctacttgagaggctgaggcaggagaatcgcttgaacccaggaggcagaggtcgcagtgagctgatatcatgccactgcactccagccttggcaacagagtgactccatctcaaaataataataataattataataataatatttttaagtcttagacagaaaatgcctatagatagaagcctatcaaacatgtattttgaatactttgatcttgacacattgcctaattattttgaaagatggtaaagatatttccaaaaaatattttcgcctatctgtttacattgacagtttacaaccataattttctaagtatatttttcaaacatgtatttttgtgttttccatcttcaaatttctgaccaatgggtttgttctcctgcaaaaacaatatccaatctgcaaaaatttttaattcttcacttgctacaactgcaaatatttatcaataaaactgataacccaaaacttgcttcagattttccctgcagtgcttaaaatatccttgcaacacaagatggtgcacaatgacaagtattatttctgaatacccagatttgatttatttataggtatttttgaaattattactcttacaggtgtagtcctctccagccccaagtaacatcttttcagatgaattcaagaggctgttcaagactttgactctactgaaaacactacaaaaggcaaaatgttgccctaggtgatagaaggtcccagtttgggaactgattttcttcctatgacaaaagctataagatgagtaaggttactaatggaaatgtatgtccacagattcacttagggagcatagtgtaaaaacatcaggaacttaaaattacaaatttgatttcaagttatatttctgtctcatgtgactttgggcaaatcatttatcttctctgagttcatttcctcatctgcaaatgacaaataaaatacgtaattatcaggataactatgagcattaaataaaacaaacgtggaaagaataaagtgtggcatacattattattttatcaaagtgcatcacgtcaataattgttattgtatacttgtattaaatgtcactttaatgcactttcccctatttttttccaaaacatacgttaaacatctgatttagctactcatcaaaacatacaatcatgttttaagatggaacactatatcagtgttactgcttttctcaataatgtgatcccaaatcagtactttcagttcaccatcacctcaaatctatagaaatgtttctttcaatgacatagatagatagatgattgatagatagatgatagatagatgataaatggatatacaattataggttaaaattaaagtttaaataagatcaatcatttgaaagttttatttccaaaggaaataaaacaacattcccaaggacagaaataatatcaaattacttgctaaatatataaatgagttatagggctaagactaagttataagagattgacaattagaaaacactctttttaatattaaggtggtatgattttctttaacaattttacaatgaaaataaaaacttaataaaaggtggtaatgggccaggcacggtggctcacgcatacaatcccagcactttgggagactaaggcgtgaggatcacttgagcccaggagttccagacatgtctatgcaacaaagtgagaccctgactctaagaaaaaaataaaatgtataaaatttaaaatagtaatgtgtccattaaaccttttattttagagtagttttagatttacagaaaaactccaaatagagaggtcccatatacatctatgggcattaatgagccaatattgatcattacattcatacttcattcagatttccttagtttataacctaatgtcctttttctgtcccaggatcccattcaggataccacattacatttagttgtcatgtttccttaggcttcccttggctgtgacagtttctgcaactttccttgtttttgatgacagttttgagaaataaactggtattttgtagaatgtccttctatggggattcgtctgatgtttttctcgtgactagacacaggtttttggtttttgaaagaacacaacggtaaagtgccatgctcatcacatggtatcaaaggtatatgccatcaccgggactcgtcttagctgtgacagtttctcaaactttaggctactcttagctgttgatgttaaccttgatcacttagctgaggtagcatctattatatttctccactgtaaagtaatgcgtttttaaagagattatattgaaggtaaattttctggacatttacactgagctaaacaaattctaaacactaatattaggttccactaagtgattactaataaatgctataaagaaaatacagtgaagtggaaaaataaaactccagaagtcttagcctgaatattcacctaatagaggtgaaagtgaatttttcccttgaactgtctgcgcaatttacaataatcctccacatactttggatattaaagatcttatcttactaattgtcataagaggtaatttaaatttaaactaaccattttgcttattgcatttttatattgccctccactaatcaatgaacactgaatattgaaataatgtaaaagacctatttcccgctagctttaaccgatttgtcataaacacctttcttgtatatgatttttaaatgtttgctaaatattaaaaagaattcaatgtgtttggttttgtaaaattacatatcgaatgtgtataattttttactaccatgttcatcacacttaatctatatccatatattgtactccaccaatatttatcagtggacaataaagaagttttgaatgcatgaatgcaacttaagaggcaccacacttggttattttgcaatgccagaataacggtgggtattcacaaattgaatagataatccagattatgtttcctccaatttaagtttttctgggtttttttttcccccttcctagaatcaattttatcattttacctatgtacaataatatacttctggaaaatgctagaattttcaccatgtaacagaatttgagcatgacagtaatgtaaaaatattcagaagtctcgaactataggtttgagttttcaaagtaaatcaaaatacagctgttttcattttactagattgtggaaacctatggatgttattgtaaaatgcatatgcattacactgactttcttaaaatgttttgaattaataaagaattcaacaatgta

SEQ ID NO: 281 - DNA, 950 bp, Homo Sapiens
agaaataccccagccaaatctctggacaagttcattgaagactatctcttgccagacacgtgtttccgcatgcaaatcaaccatgccattgacatcatctgtgggttcctgaaggaaaggtgcttccgaggtagctcctaccctgtgtgtgtgtccaaggtggtaaagggtggctcctcaggcaagggcaccaccctcagaggccgatctgacgctgacctggttgtcttcctcagtcctctcaccacttttcaggatcagttaaatcgccggggagagttcatccaggaaattaggagacagctggaagcctgtcaaagagagagagcattttccgtgaagtttgaggtccaggctccacgctggggcaacccccgtgcgctcagcttcgtactgagttcgctccagctcggggagggggtggagttcgatgtgctgcctgcctttgatgccctgggtcagttgactggcggctataaacctaacccccaaatctatgtcaagctcatcgaggagtgcaccgacctgcagaaagagggcgagttctccacctgcttcacagaactacagagagacttcctgaagcagcgccccaccaagctcaagagcctcatccgcctagtcaagcactggtaccaaaattgtaagaagaagcttgggaagctgccacctcagtatgccctggagctcctgacggtctatgcttgggagcgagggagcatgaaaacacatttcaacacagcccagggatttcggacggtcttggaattagtcataaactaccagcaactctgcatctactggacaaagtattatgactttaaaaaccccattattgaaaagtacctgagaaggcagctcacgaaacccaggtatgctatccccacatggcttagctcccctatgtaaatgaacacctggatacaggtacagtgccttggaaatggagg

SEQ ID NO: 282 - DNA, 705 bp, Homo Sapiens
gaaggatttcgctggatgatacaagcaatacaagtactaaggtttcatcttttggagttagaaaaggtccacgaactgtgcgataacttctgccaccgatacattagctgtttgaaggggaaaatgcccatcgacctcgtcattgatgaaagagacggcagctccaagtcagatcatgaagaactttcaggctcctccacaaatctcgctgaccataacccttcttcttggcgagaccacgatgatgcaacctcaacccactcagcaggcaccccagggccctccagtgggggccatgcttcccagagcggagacaacagcagtgagcaaggggatggtttagacaacagtgtagcttcacctggtacaggtgacgatgatgatccggataaggacaaaaaacgccagaagaaaagaggcattttccccaaagtagcaacaaatatcatgagagcatggctcttccagcatctcacacatccgtacccttccgaagagcagaagaaacagttagcgcaagacacaggacttacaattctccaagtaaacaactggtttattaatgccagaagaagaatagtacagcccatgattgaccagtcaaatcgagcagtgagccaaggagcagcatatagtccagagggtcagcccatggggagctttgtgttggatggtcagcaacacatggggatccggcctgcaggt

SEQ ID NO: 283 - DNA, 4250 bp, Homo Sapiens
ggagttgcggccgaggcggccgtgaccggagcgcggctcaggggccccagtggccgccgcggagcgaggttgcctggagagagcgcctgggcgcagaagggttaacgggccaccgggggctcgcagagcaggagggtgctctcggacggtgtgtcccccactgcactcctgaacttggaggacagggtcgccgcgagggacgcagagagcaccctccacgcccagatgcctgcgtagtttttgtgaccagtccgctcctgcctccccctggggcagtagagggggagcgatggagaactggactggcaggccctggctgtatctgctgctgcttctgtccctccctcagctctgcttggatcaggaggtgttgtccggacactctcttcagacacctacagaggagggccagggccccgaaggtgtctggggaccttgggtccagtgggcctcttgctcccagccctgcggggtgggggtgcagcgcaggagccggacatgtcagctccctacagtgcagctccacccgagtctgcccctccctccccggcccccaagacatccagaagccctcctcccccggggccagggtcccagaccccagacttctccagaaaccctccccttgtacaggacacagtctcggggaaggggtggcccacttcgaggtcccgcttcccacctagggagagaggagacccaggagattcgagcggccaggaggtcccggcttcgagaccccatcaagccaggaatgttcggttatgggagagtgccctttgcattgccactgcaccggaaccgcaggcaccctcggagcccacccagatctgagctgtccctgatctcttctagaggggaagaggctattccgtcccctactccaagagcagagccattctccgcaaacggcagcccccaaactgagctccctcccacagaactgtctgtccacaccccatccccccaagcagaacctctaagccctgaaactgctcagacagaggtggcccccagaaccaggcctgcccccctacggcatcaccccagagcccaggcctctggcacagagcccccctcacccacgcactccttaggagaaggtggcttcttccgtgcatcccctcagccacgaaggccaagttcccagggttgggccagtccccaggtagcagggagacgccctgatccttttccttcggtccctcggggccgaggccagcagggccaagggccttggggaacgggggggactcctcacgggccccgcctggagcctgaccctcagcacccgggcgcctggctgcccctgctgagcaacggcccccatgccagctccctctggagcctctttgctcccagtagccctattccaagatgttctggggagagtgaacagctaagagcctgcagccaagcgccctgcccccctgagcagccagacccccgggccctgcagtgcgcagcctttaactcccaggaattcatgggccagctgtatcagtgggagcccttcactgaagtccagggctcccagcgctgtgaactgaactgccggccccgtggcttccgcttctatgtccgtcacactgaaaaggtccaggatgggaccctgtgtcagcctggagcccctgacatctgtgtggctggacgctgtctgagccccggctgtgatgggatccttggctctggcaggcgtcctgatggctgtggagtctgtgggggtgatgattctacctgtcgccttgtttcggggaacctcactgaccgagggggccccctgggctatcagaagatcttgtggattccagcgggagccttgcggctccagattgcccagctccggcctagctccaactacctggcacttcgtggccctgggggccggtccatcatcaatgggaactgggctgtggatccccctgggtcctacagggccggcgggaccgtctttcgatataaccgtcctcccagggaggagggcaaaggggagagtctgtcggctgaaggccccaccacccagcctgtggatgtctatatgatctttcaggaggaaaacccaggcgttttttatcagtatgtcatctcttcacctcctccaatccttgagaaccccaccccagagccccctgtcccccagcttcagccggagattctgagggtggagcccccacttgctccggcaccccgcccagcccggaccccaggcaccctccagcgtcaggtgcggatcccccagatgcccgccccgccccatcccaggacacccctggggtctccagctgcgtactggaaacgagtgggacactctgcatgctcagcgtcctgcgggaaaggtgtctggcgccccattttcctctgcatctcccgtgagtcgggagaggaactggatgaacgcagctgtgccgcgggtgccaggcccccagcctcccctgaaccctgccacggcaccccatgccccccatactgggaggctggcgagtggacatcctgcagccgctcctgtggccccggcacccagcaccgccagctgcagtgccggcaggaatttggggggggtggctcctcggtgcccccggagcgctgtggacatctcccccggcccaacatcacccagtcttgccagctgcgcctctgtggccattgggaagttggctctccttggagccagtgctccgtgcggtgcggccggggccagagaagccggcaggttcgctgtgttgggaacaatggtgatgaagtgagcgagcaggagtgtgcgtcaggccccccgcagccccccagcagagaggcctgtgacatggggccctgtactactgcctggttccacagcgactggagctccaagtgctcagccgagtgtgggacgggaatccagcggcgctctgtggtctgccttgggagtggggcagccctcgggccaggccagggggaagcaggagcaggaactgggcagagctgtccaacaggaagccggccccctgacatgcgcgcctgcagcctggggccctgtgagagaacttggcgctggtacacagggccctggggtgagtgctcctccgaatgtggctctggcacacagcgtagagacatcatctgtgtatccaaactggggacggagttcaacgtgacttctccgagcaactgttctcacctccccaggccccctgccctgcagccctgtcaagggcaggcctgccaggaccgatggttttccacgccctggagcccatgttctcgctcctgccaagggggaacgcagacacgggaggtccagtgcctgagcaccaaccagaccctcagcacccgatgccctcctcaactgcggccctccaggaagcgcccctgtaacagccaaccctgcagccagcgccctgatgatcaatgcaaggacagctctccacattgccccctggtggtacaggcccggctctgcgtctacccctactacacagccacctgttgccgctcttgcgcacatgtcctggagcggtctccccaggatccctcctgaaaggggtccggggcaccttcacggttttctgtgccaccatcggtcacccattgatcggcccactctgaaccccctggctctccagcctgtcccagtctcagcagggatgtcctccaggtgacagagggtggcaaggtgactgacacaaagtgactttcagggctgtggtcaggcccatgtggtggtgtgatgggtgtgtgcacatatgcctcaggtgtgcttttgggactgcatggatatgtgtgtgctcaaacgtgtatcacttttcaaaaagaggttacacagactgagaaggacaagacctgtttccttgagactttcctaggtggaaaggaaagcaagtctgcagttccttgctaatctgagctacttagagtgtggtctccccaccaactccagttttgtgccctaagcctcatttctcatgttcagacctcacatcttctaagccgccctgtgtctctgaccccttctcatttgcctagtatctctgcccctgcctccctaattagctagggctggggtcagccactgccaatcctgccttactcaggaaggcaggaggaaagagactgcctctccagagcaaggcccagctgggcagagggtgaaaaagagaaatgtgagcatccgctcccccaccaccccgcccagcccctagccccactccctgcctcctgaaatggttcccacccagaactaatttattttttattaaagatggtcatgacaaatg

SEQ ID NO: 284 - DNA, 4327 bp, Homo Sapiens
ggagacaccggaaggagccgcggctgctgcgggaagtggccagttcaggaggcggaccccccgagggcagcgctgcggggccgttttccggccctcctgacgcgacactgcccctctccgagagctgagaaggaaaagaggagcttgcggaggtgcggctgcaggccgttgttggtcgagctggcgggtcccgcgggccaggccgtggaggtgttacctcattttgaaagtcttgggaaacaggaaaaaattcctaacaaaatgtcagcttttcgaaatcattgtccacatttggattcagttggtgaaataacaaaagaagatttgatacaaaaatcccttggtacttgtcaggattgtaaagtccaaggaccaaatctttgggcatgtctggagaatagatgttcatatgttggctgtggtgaatcacaagtagatcacagcaccatacattctcaggagacaaagcattatctaactgtgaaccttaccactcttcgagtatggtgttatgcttgcagcaaagaagtatttttggataggaaattaggaactcagccttcattgcctcatgtaagacaacctcaccaaatacaagaaaacagtgtccaggattttaaaatacccagtaatacaacattaaaaactcctctggttgccgtatttgatgatctggatatagaagcggatgaagaagatgaacttagggccagaggtcttacaggtttgaaaaatattggaaatacttgttacatgaatgcagctttgcaggctctttctaattgcccacctttgacacagttttttcttgattgtggaggactagctcgaacagataagaaacctgccatttgtaaaagttatctcaaactaatgacagagctgtggcataaaagcaggccaggatctgttgtgcctactactctgtttcaaggaattaaaactgtaaatccaacatttcgggggtattctcagcaggatgctcaagaattccttcgatgtttaatggatttgcttcatgaagaattgaaagagcaagtcatggaagtagaagaagatccgcaaaccataaccactgaggagacaatggaagaagacaagagccagtcggatgtagattttcagtcttgtgaatcttgtagcaacagtgatagagcagaaaatgaaaatggctctagatgcttttctgaagataataatgaaacaacaatgttaattcaggatgatgaaaacaattcagaaatgtcaaaggattggcaaaaagagaagatgtgcaataagattaataaagtaaattctgaaggcgaatttgataaagatagagactctatatctgaaacagtcgacttaaacaaccaggaaactgtcaaagtgcaaatacacagcagagcttcagaatatatcactgatgtccattcgaatgacctgtctacaccacagatccttccatcaaatgaaggtgttaatccacgtttatcggcaagccctcctaaatcaggcaatttgtggccaggattggcaccaccacacaaaaaagctcagtctgcatctccaaagagaaaaaaacagcacaagaaatacagaagtgttatttcagacatatttgatggaacaatcattagttcagtgcagtgtctgacttgtgacagggtgtctgtaaccctcgagacctttcaagatctgtccttgccaattcctggcaaggaagaccttgctaagctgcattcatcaagtcatccaacttctatagtcaaagcaggatcatgtggcgaagcatatgctccacaagggtggatagcttttttcatggaatatgtgaagaggtttgttgtctcatgtgtccctagctggttttggggtccagtagtaaccttgcaagattgtcttgctgccttctttgccagagatgaactaaaaggtgacaatatgtacagttgtgaaaaatgcaaaaagttgagaaatggagtgaagttttgtaaagtacaaaactttcctgagattttgtgcatccaccttaaaagattcagacatgaactaatgttttccaccaaaatcagtacccatgtttcatttccgctagaaggcttggatcttcagccatttcttgctaaggatagtccagctcaaattgtgacatatgatcttctgtcagtcatttgccatcatggaactgcaagtagtggacactatatagcctactgccgaaacaatctaaataatctctggtatgaatttgatgatcagagtgtcactgaagtttcagaatctactgtacaaaatgcagaagcttacgttcttttctataggaagagcagcgaagaggcacaaaaagagaggagaaggatatcaaatttattgaacataatggaaccaagcctccttcagttttatatttctcgacagtggcttaataaatttaagacctttgccgaacctggccctatttcaaataatgactttctttgtattcatggaggtgttcctccaagaaaagctggttatattgaagacctggttttgatgctgcctcagaacatttgggataacctatatagcaggtatggtggaggaccagctgtcaaccatctgtacatttgtcatacttgccaaattgaggcggagaaaattgaaaaaagaagaaaaactgaattggaaatttttattcggcttaacagagcgttccaaaaagaggactctccagctactttttattgcatcagtatgcagtggtttagagaatgggaaagttttgtgaagggtaaagatggagatcctccaggtcctattgacaatactaagattgcagtcactaaatgtggtaatgtgatgcttaggcaaggagcagattctggccagatttctgaagaaacatggaattttctgcagtctatttatggtggagggcctgaagttatcctgcgacctccggttgttcatgttgatccagatatacttcaagcagaagaaaaaattgaagtagaaactcggtctttgtaatttttaggatgtagagagttctaatgaggaatcattttcatgtgccctgacatgtacacatgcgaaaacattcctaaaagcgtgtttatttgctttattttttttcatcatttatcccatttatttcttcttagtgggcattatggaagaatatattaaaatgtgtaatataccacaggttggtatatttagttttaaatacttaccataaagtctttcagtgtaatttttttttgagacagagtcttgctttgtcacccaggctggagtgctgtggtgttacctcagctcactgcagcctccacctcctgggttcaagcgattctcctgcctcagcctctcgagtagctgggattacaggcacctgccaccatgcccggctaatttttgtattttagtagagatggggtttcaccatgttggccaggctagtctcaaactcctgacctcaggtgatccacccacctcggcctcccaaagtgctgggattacaggtgtgagccacagcgcctggcccagtgtaatatttttgaaagaggagggacaattgtgaaatcagtaggttatctttaatctttacactacatgcagatccatagtatcctttgtagtgttgtaaatacttttgctttgaaaactttttcattgtcctaaatcaccctgactctgaccagtctttcagttctccaaaagcccaatttaattgtatagttttgtcatggcttcatataataaagagcctattttaagttgaaagtagtagtcagaaaattgttaatttcctaaagctcaggaaactagggtgtcactttttttgcactgcagcatatacactaactagcttattaaaatttacaaaatgtctttttgaatgtatcaaggatatatttagtttgagtggaatttgtcagcagatatcagtaacttattgccgcttatattgtacaatgttaaacttcaattcctgtaacctggttagtattaatgtcagtgactaaaaaacttagagttagttttagggcactttttattttgagagcatgaagtgtggaatgtgtcactacgattgttgataaagctgaggccacttgcaacttgattttttaaatgaaatagataaagtctttttgaataatatagtatgcactgctatttgcttgattatgtaatgtcaaaagtttaactatattccaagtacaaaaacatactggattacattgaggatgttgaatagcattcatgatggctttgttttggtttggggcagctgtcaccagctaaagcaatgttgttaaaattagctcaataaaaatgtctttaaaatgtaaaa

SEQ ID NO: 285 - DNA, 2967 bp, Homo Sapiens
gagctcctctgctactcagagttgcaacctcagcctcgctatggctcccagcagcccccggcccgcgctgcccgcactcctggtcctgctcggggctctgttcccaggacctggcaatgcccagacatctgtgtccccctcaaaagtcatcctgccccggggaggctccgtgctggtgacatgcagcacctcctgtgaccagcccaagttgttgggcatagagaccccgttgcctaaaaaggagttgctcctgcctgggaacaaccggaaggtgtatgaactgagcaatgtgcaagaagatagccaaccaatgtgctattcaaactgccctgatgggcagtcaacagctaaaaccttcctcaccgtgtactggactccagaacgggtggaactggcacccctcccctcttggcagccagtgggcaagaaccttaccctacgctgccaggtggagggtggggcaccccgggccaacctcaccgtggtgctgctccgtggggagaaggagctgaaacgggagccagctgtgggggagcccgctgaggtcacgaccacggtgctggtgaggagagatcaccatggagccaatttctcgtgccgcactgaactggacctgcggccccaagggctggagctgtttgagaacacctcggccccctaccagctccagacctttgtcctgccagcgactcccccacaacttgtcagcccccgggtcctagaggtggacacgcaggggaccgtggtctgttccctggacgggctgttcccagtctcggaggcccaggtccacctggcactgggggaccagaggttgaaccccacagtcacctatggcaacgactccttctcggccaaggcctcagtcagtgtgaccgcagaggacgagggcacccagcggctgacgtgtgcagtaatactggggaaccagagccaggagacactgcagacagtgaccatctacagctttccggcgcccaacgtgattctgacgaagccagaggtctcagaagggaccgaggtgacagtgaagtgtgaggcccaccctagagccaaggtgacgctgaatggggttccagcccagccactgggcccgagggcccagctcctgctgaaggccaccccagaggacaacgggcgcagcttctcctgctctgcaaccctggaggtggccggccagcttatacacaagaaccagacccgggagcttcgtgtcctgtatggcccccgactggacgagagggattgtccgggaaactggacgtggccagaaaattcccagcagactccaatgtgccaggcttgggggaacccattgcccgagctcaagtgtctaaaggatggcactttcccactgcccatcggggaatcagtgactgtcactcgagatcttgagggcacctacctctgtcgggccaggagcactcaaggggaggtcacccgcaaggtgaccgtgaatgtgctctccccccggtatgagattgtcatcatcactgtggtagcagccgcagtcataatgggcactgcaggcctcagcacgtacctctataaccgccagcggaagatcaagaaatacagactacaacaggcccaaaaagggacccccatgaaaccgaacacacaagccacgcctccctgaacctatcccgggacagggcctcttcctcggccttcccatattggtggcagtggtgccacactgaacagagtggaagacatatgccatgcagctacacctaccggccctgggacgccggaggacagggcattgtcctcagtcagatacaacagcatttggggccatggtacctgcacacctaaaacactaggccacgcatctgatctgtagtcacatgactaagccaagaggaaggagcaagactcaagacatgattgatggatgttaaagtctagcctgatgagaggggaagtggtgggggagacatagccccaccatgaggacatacaactgggaaatactgaaacttgctgcctattgggtatgctgaggccccacagacttacagaagaagtggccctccatagacatgtgtagcatcaaaacacaaaggcccacacttcctgacggatgccagcttgggcactgctgtctactgaccccaacccttgatgatatgtatttattcatttgttattttaccagctatttattgagtgtcttttatgtaggctaaatgaacataggtctctggcctcacggagctcccagtcctaatcacattcaaggtcaccaggtacagttgtacaggttgtacactgcaggagagtgcctggcaaaaagatcaaatggggctgggacttctcattggccaacctgcctttccccagaaggagtgatttttctatcggcacaaaagcactatatggactggtaatggttacaggttcagagattacccagtgaggccttattcctcccttccccccaaaactgacacctttgttagccacctccccacccacatacatttctgccagtgttcacaatgacactcagcggtcatgtctggacatgagtgcccagggaatatgcccaagctatgccttgtcctcttgtcctgtttgcatttcactgggagcttgcactatgcagctccagtttcctgcagtgatcagggtcctgcaagcagtggggaagggggccaaggtattggaggactccctcccagctttggaagcctcatccgcgtgtgtgtgtgtgtgtatgtgtagacaagctctcgctctgtcacccaggctggagtgcagtggtgcaatcatggttcactgcagtcttgaccttttgggctcaagtgatcctcccacctcagcctcctgagtagctgggaccataggctcacaacaccacacctggcaaatttgattttttttttttttccagagacggggtctcgcaacattgcccagacttcctttgtgttagttaataaagctttctcaactgcc

SEQ ID NO: 286 - DNA, 1652 bp, Homo Sapiens
gttattttcttttctcccccagctgccccagggttctggtttcccgaatcacttggcaaataaccagcaggtgggcagatgtcttttttgcgttcctacggacgcgtaggcaagttcgatgcgccggagtgaacagccagggtcccatctctcagccggctcccgggcggtgctagcagggaagagggacgcgccggcgaatgaaacactactagcccggaaagccgccctggaccttccacccgggcagcgagtctggcggcccctcgccgccgccccctccgaccagaacagactgcgctgcgagccccgggcttccgccgcagcgcgcagcaattggaggtgccagaggagaccagcagcagcacttgatttagctgggctgcgggaattccgacctgtacactttccagaagcctgatctctccaagtccgcgcccagggactcgagccccggcttccaggttgacccgagcgcgcccccttcgtgctctcggccgcgttcaccgcgcgaggcctccgggtcctgttaagcccgagcagcacaggccgctgcctcagcatccaccccgcagcccacgtgtggcaagccggggaaggggtggagtgaacggccggagaccacgtggagaaaggggccgctttggcccttccatctgggtgccgggagcccctaggccctccggccatggccgacagcggcgatgctggcagctccggcccctggtggaaatcgctcaccaacagcagaaagaaaagcaaggaagccgcagtgggggtgccgcctcccgcccagcccgctcccggggagcccacgccacctgcgccgcccagcccggactggaccagcagctcccgggagaaccagcaccccaatctcctcgggggcgccggcgagccccccaaaccagacaagttatacggggacaaatccggcagcagccgccgcaatttgaagatctcgcgctccggccgctttaaggagaagaggaaagtgcgcgccacgctgctcccggaggcgggcaggtccccggaggaggcaggctttcctggtgacccccacgaggacaagcagtagccccaatagcctgcgcgctccaggactgcctacccagcactaccccaaacccccagttccaaacccgagacttcaggcccgcccccttacgcgttgtctcattccaccaaattcagaatatttacacaatgccttcatgattttatttttctggaaattgaagtgtcaattgggttctcaatatttcatgactccaaggatgcattaaatatttatttgtggtaagagaagatacctgccgcggaggagggtggcataattatttttttttcaaaaagctattctggggccctggccccctggctcctgtcacagctcagcttgaactctgtagcctctcaaatgaagaaggtggctgttatttaggactctgtggaaagcaaatcacagtgctgtttttaatgcctgagaaatgcactttaggggtagacttataccttaagtgaaggagtgggggaggaagaagcattcttaagtagaagcattttaaaataaggcaggattgcttttaatgttaaactacaaaactgtacagcctattttagtgtggactattaaaacccttgcactgtaa

SEQ ID NO: 287 - DNA, 604 bp, Homo Sapiens
gacaaactcactgatgaaggactcaagcagctgggctcaaaatgcagagaactcaaagatattcatttcggccagtgttacaagatctcagatgaaggcatgatcgtcatagctaagggctgtctgaaattacaaaggatatacatgcaggaaaacaaattagtgacagatcagtcagtgaaagcatttgctgaacactgtcctgagcttcaatatgtaggcttcatgggttgttcagtcacttctaaaggagtcattcacctaaccaagctaagaaacctttccagcttggacctacgtcatatcactgaactggataatgaaaccgtgatggaaattgtcaagaggtgcaaaaatcttagctctctcaatctctgtctgaactggatcataaatgacaggtgtgtggaggtcattgcaaaggaaggacaaaacctgaaagagctatatttggtgtcctgtaaaatcacagattatggtaggtaatgaaccattttcctaatcctttctaagaataaaaagttacaaaatcattgaaagttcttaaaaagaaatcaagaactatatcatagagactgtctatcgtcacttatgctcattgtga

SEQ ID NO: 288 - DNA, 738 bp, Homo Sapiens
aatttaaggctggacacagagtcagcaacacacaagacatcatcttgaaggaaggatggctttggccagaccaagaccgagacttggagacctgattgagatttctcgctttggctatgcacactgggccatctacgtgggagatggctatgtggtccatctggctccggcaagtgaaattgctggagctggtgcggccagtgtcctgtctgccctgaccaacaaagccatagtgaagaaggaactgctgtctgtggtggctgggggagacaactacagggtcaataacaagcacgatgacagatacacaccactgccttccaacaaaatcgtcaagcgggcagaggagttggtggggcaggagttgccttattcgctgaccagtgacaactgcgagcacttcgtgaaccatctgcgctatggcgtctcccgcagtgaccaggtcactggtgcagtcacgacagtaggtgtggcagcaggcctgctggctgccgcaagccttgtggggatcctgctggccagaagcaagcgggaaaggcaataaatccaagaaattgtcccaacaaccaccaattcttacggaggaatattatttagccagcaggagtggagtttggtttactgattttactgttttgtgttcatgaatctttattttaatggagttaaaagcacaggaaaatgtatttggaaatgcagcttagtatgaattctattaaagacacaattgggctctgc

SEQ ID NO: 289 - DNA, 843 bp, Homo Sapiens
gagtcttacctcgttgtggcgtcagaaccgccgtcgctcgctcccttctcggcagtggtacctgttcccggtgtccctgaggacgtgcgggccaggtacggccccgaaagtaggaagcggagggggagcaggtttgcggggccaagtgttgcggcgacgcacctcacgtcgagaatcgggaggaggagactgcaaggataggcccaggagtaatggagtccaaagaggaacgagcgttaaacaatctcatcgtggaaaatgtcaaccaggaaaatgatgaaaaagatgaaaaggagcaagttgctaataaaggggagcccttggccctacctttgaatgttagtgaatactgtgtgcctagaggaaaccgtaggcggttccgcgttaggcagcccatcctgcagtatagatgggacataatgcataggcttggagagccacaggcaaggatgagagaggagaatatggaaaggattggggaggaggtgagacagctgatggaaaagctgagggaaaagcagttgagtcatagtttgcgggcagtcagcactgatccccctcaccatgaccatcacgatgagttttgccttatgccctgaatcctgatggtttccctgaagttaatagggagacccctgcttcctaaacttacacatttgtggtgtacctttgtcgtaaacgttttgatgttacctatttcttgtgggtctcctattaccagcttctaaatgaatgttgtttttgacccagtttgtaagtttctgtcagcaggagagttttacctattgcatggaaagatgctcattatatattgtgaagttaataaaacagttttaaaaagca

SEQ ID NO: 290 - DNA, 977 bp, Homo Sapiens
agacgtgaagcctagcagaggactttttagctgctcactggccccgcttgtctggccgactcatccgcccgcgacccctaatcccctctgcctgccccaagatgctgaagccagccctggagccccgagggggcttctccttcgagaactgccaaagaaatgcatcattggaacgcgtcctcccggggctcaaggtccctcacgcacgcaagaccgggaccaccatcgcgggcctggtgttccaagacggggtcattctgggcgccgatacgcgagccactaacgattcggtcgtggcggacaagagctgcgagaagatccacttcatcgcccccaaaatctactgctgtggggctggagtagccgcggacgccgagatgaccacacggatggtggcgtccaagatggagctacacgcgttatctacgggccgcgagccccgcgtggccacggtcactcgcatcctgcgccagacgctcttcaggtaccagggccacgtgggtgcatcgctgatcgtgggcggcgtagacctgactggaccgcagctctacggtgtgcatccccatggctcctacagccgtctgcccttcacagccctgggctctggtcaggacgcggccctggcggtgctagaagaccggttccagccgaacatgacgctggaggctgctcaggggctgctggtggaagccgtcaccgccgggatcttgggtgacctgggctccgggggcaatgtggacgcatgtgtgatcacaaagactggcgccaagctgctgcggacactgagctcacccacagagcccgtgaagaggtctggccgctaccactttgtgcctggaaccacagctgtcctgacccagacagtgaagccactaaccctggagctagtggaggaaactgtgcaggctatggaggtggagtaagctgaggcttagagcttggaacaagggggaataaacccagaaaatacagttaaa

SEQ ID NO: 291 - DNA, 1356 bp, Homo Sapiens
acactccctacaccacacccatactcagcccctgcaggcaaggagagaacaggtcaggttcccgagagctcaggaacatggagctgatccaggacacctcccgcccgccactggagtacgtgaagggggtcccgctcatcaagtactttgcagaggcactggggcccctgcagagcttccaagcccgacctgatgacctgctcatcaacacctaccccaagtctggcaccacctgggtgagccagatactggacatgatctaccagggcggcgacctagagaagtgtaaccgggctcccatctacgtacgggtgcccttccttgaggtcaatgatccaggggaaccctcagggctggagactctgaaagacacaccgcccccacggctcatcaagtcacacctgcccctggctctgctccctcagactctgttggatcagaaggtcaaggtggtctatgttgcccgaaacccaaaggacgtggcggtctcctactaccatttccaccgtatggaaaaggcgcaccctgagcctgggacctgggacagcttcctggaaaagttcatggctggagaagtgtcctacgggtcctggtaccagcacgtgcaggagtggtgggagctgagccgcacccaccctgttctctacctcttctatgaagacatgaaggagaaccccaaaagggagattcaaaagatcctggagtttgtggggcgctccctgccagaggagaccatggacttcatggttcagcacacgtcgttcaaggagatgaagaagaaccctatgaccaactacaccaccgtcccccaggagctcatggaccacagcatctcccccttcatgaggaaaggcatggctggggactggaagaccaccttcaccgtggcgcagaatgagcgcttcgatgcggactatgcggagaagatggcaggctgcagcctcagcttccgctctgagctgtgagaggggctcctggagtcactgcagagggagtgtgcgaatctaccctgaccaatgggctcaagaataaagtatgatttttgagtcaggcacagtggctcatgtctgcaatcccagcgatttgggaggttgagctggtaggatcacaataggccacgaatttgagaccagcctggtaaaatagtgagacctcatctctacaaagatgtaaaaaaattagccacatgtgctggcacttacctgtagtcccagctacttgggaagcagaggctggaggatcatttcagcccaggaggttgtggatacagtgagttatgacatgcccattcactacagcctggatgacaagcaagaccctccctccaaagaaaataaagctcaaaataaaatatga

SEQ ID NO: 292 - DNA, 5702 bp, Homo Sapiens
gcaatgcactgagtaacggggcgggccgagagcagtcaccaacccctctcgttgaggctgctcggttgtggccagaaacgctggctctggcattaactgtctacacccctccccttacttgggacaggaccgcatagccctcccctccccccgtcctgcaagatcttatgcggctaggtgcctgggaagtaacagcaagaggtttgatttaattttggatgagatcgttcttgcagcaagatgttaataagacaaaatctagactaaatgtgttaaatgggcttgccaacaatatggatgatttgaagataaacaccgatattactggtgctaaagaagaactcctagatgacaacaattttatctcagacaaagagagcggagttcataagccaaaagattgtcaaacatcatttcagaaaaataatacgttgactctgcctgaagaactgtcaaaggacaaatctgaaaacgccttaagtggaggccagtctagtctatttatacatgctggtgctcctactgtttctagtgaaaactttatcttgcctaaaggagctgctgttaatggaccagtttcacactcctccttaactaagacttccaatatgaataaaggcagtgtttcattaaccactggacagcctgtggatcagccaacaacagaatcttgttcaactttgaaggtagcagctgatcttcagctgtctacaccacagaaagcaagtcaacaccaagttttatttttgttatcagatgtagcacatgctaagaatcccacccattccaataaaaaactacctacctctgcttcagttggttgtgacattcagaattcagtagggagtaatataaagtcagatggcactttaataaatcaagtagaggtgggtgaggatggtgaagatttattggtgaaagatgattgtgtcaatacagtaacgggaatttcctcaggtacagatggatttaggtcagaaaatgatacaaactgggatccccaaaaagagttcattcaatttcttatgactaatgaggaaacagtagataaagctccacctcattctaaaataggtctagaaaaaaaaagaaagcgaaaaatggatgtaagcaagataactcgttataccgaggattgctttagtgattctaattgtgtacccaataaatcaaaaatgcaagaagtagactttctagaacaaaatgaagagctacaagcagtagactcacagaaatatgcattatcaaaagtgaagcctgaatcaactgatgaagacttagaatctgtggatgccttccaacatctaatttataacccagataagtgtggagaagagagttcacctgttcatactagcacttttctttcaaataccttaaaaaagaaatgtgaagagagtgattctgagtcacctgctactttcagtaccgaagagccatcattctacccctgtacaaagtgcaatgtgaattttagggagaagaagcacctccacaggcatatgatgtatcatttagatgggaatagtcactttcgccatcttaatgtcccaaggccatatgcttgtagagaatgtggacggacatttcgagatcgcaattcacttctaaaacatatgattattcaccaggagagaagacagaagttgatggaggaaattcgtgaattgaaagaacttcaggatgaaggaagaagtgcacgattacagtgtcctcagtgtgtgtttggtaccaattgccctaaaacatttgtgcaacatgctaaaacccatgaaaaagataaaaggtactactgctgtgaagagtgtaacttcatggcagtgacagaaaatgaattggaatgccatcgaggcattgcacatggggcagtggtaaaatgccctatggtcacttctgatattgcccagagaaaaacacaaaaaaagactttcatgaaagactctgtagtaggatcatccaaaaaatcagctacctacatatgtaagatgtgtccttttactacttcagccaaaagtgttttaaaaaagcacacggagtacttgcattcatcatcatgtgttgattcatttggtagtcctcttggacttgataaaagaaaaaatgacatccttgaagaacctgtagatagtgatagcactaaaacattaactaaacaacagtcaaccacatttccaaagaactctgctttaaaacaagatgtgaagcgaacatttggatcaacctcacaatcaagtagtttttcaaaaattcataagcggccacacagaatacagaaagctcggaaaagcattgcccaatcaggtgtaaacatgtgcaatcaaaacagctctcctcataagaatgttacaattaaaagcagcgttgaccaaaaacctaagtatttccatcaagcagcaaaagaaaagtctaatgccaaggcaaatagccactatttgtatagacacaaatatgaaaactataggatgatcaaaaaatcaggtgaatcatatcctgtgcatttcaaaaaagaagaagctagttcattaaattctttacacctgttttcatcatcaagtaattctcacaacaattttatttcagaccctcataagcctgacgccaaaaggcctgaaagcttcaaagatcacagacgtgtagctgtaaagagagtaattaaggaatctaagaaggaaagttctgttggaggggaagacttggatagctatccagattttttgcataaaatgactgttgtcgttttgcaaaaacttaattctgctgaaaagaaagatagttatgaaacagaagatgaaagttcctgggataatgttgagttaggagactacactacacaggccatagaagatgaaacctatagtgatattaatcaagagcatgtaaatttattccctttatttaagagcaaagtggaaggtcaggagcctggagaaaatgctactcttagttatgaccaaaacgatggcttttattttgaatactatgaagatactggaagtaacaactttttgcatgagatacatgatcctcagcatttagaaactgcagatgcttcattgtcaaagcatagttctgtttttcattggactgatttgtctcttgagaagaaatcgtgtccttactgcccagcaacatttgaaacaggtgttgggttatcaaatcatgtcagggggcatcttcacagagcaggattaagctatgaagcccgtcatgttgtatcaccagaacaaatagccacaagtgacaaaatgcagcatttcaaaagaactggcacaggaacacctgttaaacgagttagaaaagctatagagaagtctgaaaccacttctgaacacacttgtcagctctgtggtggttggtttgatactaaaattggattatcaaatcatgttagaggccacttgaaaagacttggaaagacgaaatgggatgctcacaaatctccaatctgtgttctgaatgagatgatgcaaaatgaagaaaaatatgaaaaaatcttaaaggcattgaacagtcgtcgtattattcccagaccatttgtagctcaaaaacttgcatcaagtgatgactttatatctcaaaatgttatacctcttgaagcataccgtaatggcctaaagactgaagctctgtcagtgtctgcatcagaagaagaagggctgaatttcttaaatgaatatgatgaaacaaaaccagaactgcccagtgggaaaaagaatcagtctcttacactcatagaacttcttaaaaataaaaggatgggagaagaaaggaattctgctatttctcctcaaaagatccataatcagacagcaagaaagagattcgttcagaaatgcgttcttccattaaatgaggatagtccgttgatgtatcagccacaaaaaatggacttgactatgcactcagccttagattgtaagcaaaagaaatcaaggtcaagatctggaagcaagaagaaaatgctaacattacctcatggtgctgacgaggtttacattctccgatgcaggttttgtggcctagtctttcgaggacccttgtctgttcaggaagactggattaagcacttacaacgacatattgtaaacgctaatcttccacggactggagctggcatggtggaagtcacgtcactacttaaaaagcctgcctccattacagaaacttcattttctctactaatggccgaagcagcttcatagaaccaggaaaccttttaaatagccagtttgaattggatgtaaatttgaaattctttttttttaagccacattaaattatctgtttataaatactaaagcaggaaaatggggggaaagtgaattacagtgacatcagagcaaattgaatacttaaaacagtaagtagtctatatattttatatagggtggaagatgtgtttttaaggtttatgaagttttgttggttaactgtgttcactcagtaaaagagcagtacatgtaagcagccattaataaactgttgcacatggatacttatagacagacttattggacaattatgttttttgcagtgttaccagaatcaaggctctgtttattccccacaagacttgcatagaaaaataagatattatattttgtttgtatgtatttagtgttttgtataataccaagaaccgctgactaaatttactcaaattagggcattaaatatcatgtacttcatagtttgagactgttcactcaaatagggcagagtactattctatctagatgtgtaagtgttttttttaaaatcacatggaacggttttttttatactaaaaagtggagggagatttgtttaaacaagtatttctaaaagaaatatgtacatagttctggaaattatttgtggtaaggaaatattctttactccagttgcatttctcagacaataaagtggtgcatccatgctacctcctactttgtcaacaaagatgctatttaccctttacatttttgtatcataatagattttaaaaatctaatgttctttattgcaagacattcttttgttaacaggtttgtttctttttaatgttttacctaaaatttgacatgcttacaggacaggtttgcctcttactttatttaacattgtagaaatgtaattaataaacaatgctcactacacagtttagaatagacgttctcatttatattatcttccaaatttgatcagttagcaaaacttaatacaccaattaaaatatttctacatatgagaatgtttacaatttaaattttagaacttgttttggatgtgattatatgtacgaaaatcgtgtaacactatgctcatgctaagaaccgacataacagaattactgaaataaatgtgctgtgaggaatggaaaatatggtgcaggtgtcttggtcatgataaattgtgattctttttaaaaattttttccaaaaacaattaggtattttaatctgaaatcagattcctttacaaacaacaagtttttgtatgcaagcaccattttatttcatgtagtatggctaatactatagttgaaccaaggatatgcattgattctttgcttcgtatgtaaataaagttaaaaacagttaaaataaggagtattttggtagagtatatacatacctcactgccagtgaaattgctttcctatggtatatctccttaccagaaaaatctctaaataaaaaaaggtttaaagaaaattaaaa

SEQ ID NO: 293 - DNA, 2835 bp, Homo Sapiens
cactttgcgggcggcactttttccaggttgttaatccagctaatggagaaggatagatgcacgctacttggtttagaaaaaaaaacaaaaatgagcaaacgagacgccccttccgttttatgataactaagctgcagggaaataaatcggctggccctactgcaatctactgcactcgagaaacatcacagaaaattctttgatttatcttaatagtgacaagtgagcctgcttctgtcaattactgaagctataaggagattttttaaaaattaaacttcaacacaatgaggtgttgccacatctgcaaacttcctgggagagtaatggggattcgagtgcttcgattatctttggtggtcatcctcgtattattactggtagctggtgctttgactgccttacttcccagtgttaaagaagacaagatgctcatgttgcgtagggaaataaaatcccagggcaagtccaccatggactcctttactctcataatgcagacgtacaacagaacagatctcttattgaaacttttaaatcattatcaggctgtaccaaatctgcacaaagtgattgtggtatggaacaatattggagagaaggcaccagatgaattatggaattctctagggccccaccctatccctgtgatcttcaaacaacagacagcaaacaggatgagaaatcgactccaggtctttcctgaactggaaaccaatgcagtgttgatggtagatgatgacacactcatcagcaccccagaccttgtttttgctttctcagtttggcagcaatttcctgatcaaattgtaggatttgttcctagaaagcacgtctctacttcatcaggtatctacagttatggaagttttgaaatgcaagcaccagggtctggaaatggtgaccagtactctatggtgctgattggagcctcattcttcaatagcaaatatcttgaattatttcagaggcaacctgcagctgtccatgctttgatagatgatactcaaaactgtgatgatattgccatgaattttatcattgccaagcatattggcaagacttcagggatatttgtgaagcctgtaaacatggacaatttggaaaaagaaaccaacagtggctattctggaatgtggcatcgagctgagcacgctctgcagaggtcttattgtataaataagcttgttaatatctatgatagcatgcccttaagatactccaacattatgatttcccagtttggttttccatatgccaactacaaaagaaaaatataaaagtaaaacaaacaaaaacaaacctgaaaactgcttggcatttgagtagcttctccatgctatgtatttttttaagcaacatcatgaattttatctactccagaagtctctacaatagaaaaaaaagtgcagtgcttctaggatataaaattcacattacttttgaaagccaagaagttggtcttatccagttaggtcttcttatgaagagttttcatccagggatataactccttggtcagtgattttattgtttacatcctgagactgttctacagtttctttgactcctggcatttgccttaaggacctatagcaagctgtttctaggatcagaaactcaagagaggcatttctctgctttttcactaaaggtcagttgttttaatttgaaacctgaaatgcctctttagcaaaagcctgtggtatggggtaaagccatgtaagaagagaatagtctcagtcacatatgaagaggaaaatttgcagctgccagtgctttccttgtggccctgccaaccagctcttccaggacgaactcagtccagcatggttttgatgtaaccatccatgcttttatttttgttaagtcttttgtgactgggacagttaattttagtagctgaagaacgtctagttgtttgcttgatatttgtgaacatttactgcatggatcacaaaacaatataccctgtatttcttacacgccacttatatgcagcaaggagtaaatgtgttactagattcgggtagtgcattttgtcactgaatctgaccttgagaatgtacattaattcttatattttacataatgtatgtgttgtttaagaaatgtataaaaaacctgaaaaaaatgagtaagaactggcagaagttaaaaccctttgtatcaaaagatctttattggtagagcactggttatcttctggatactaaaaagttgtattacaaagccaaacacttgcattcacaactttaaaaaaagatccaaggaactattcataatgatgaaatttcaactacatacaaggaggagaaaataagaacccagtcataacagaggaattctataggagtctgcatcaattcattcttaaggttgcctactctctgttatgtgaattagcgtctgtgtttcacccattgtctgtgtttagtccttgttcaccactaaggcaaggaattcttaactaggcctctgtttaccaacttctctttctcctcctttccctcttattcctccttctcctcttccttcttatataatgctagtatattctcaaaattgcaaagctgtgagaatattaaaataatcatggctaatgttccaataatgaggtctttgtgcatttagttccgcatatgatggttttttttttacattaaagagtatatgtgtcttaatgcagtcagattgtaaaaaacaaaaacaaagaaactaagaatcttactaaaaatcgataatgtcagttatctgttttgtccaatattggtagtacttttttgcctcttatgattcctctagcagataaataaaagaaacttttgccatcca

SEQ ID NO: 294 - DNA, 2803 bp, Homo Sapiens
gcggtagcggagaagactggagctccgaggagctgcatctgcggcaacctgtgtgctgacgctacgtgcctcctggctccgacgtagctcgcagctccccagtctcactccattccttccccacctggcgcgcacctgctcaagaccagggtcctgccaagcgctaggagggcgcgtgccaggggcgctagggaactgcggagcgcgcgcgccatggggccgccgcctggggccggggtctcctgccgcggtggctgcggcttttccagattgctggcatggtgcttcctgctggccctgagtccgcaggcacccggttcccggggggctgaagcagtgtggaccgcgtacctcaacgtgtcctggcgggttccgcacacgggagtgaaccgtacggtgtgggagctgagcgaggagggcgtgtacggccaggactcgccgctggagcctgtggctggggtcctggtaccgcccgacgggcccggggcgcttaacgcctgtaacccgcacacgaatttcacggtgcccacggtttggggaagcaccgtgcaagtctcttggttggccctcatccaacgcggcgggggctgcaccttcgcagacaagatccatctggcttatgagagaggggcgtctggagccgtcatctttaacttccccgggacccgcaatgaggtcatccccatgtctcacccgggtgcagtagacattgttgcaatcatgatcggcaatctgaaaggcacaaaaattctgcaatctattcaaagaggcatacaagtgacaatggtcatagaagtagggaaaaaacatggcccttgggtgaatcactattcaatttttttcgtttctgtgtccttttttattattacggcggcaactgtgggctattttatcttttattctgctcgaaggctacggaatgcaagagctcaaagcaggaagcagaggcaattaaaggcagatgctaaaaaagctattggaaggcttcaactacgcacactgaaacaaggagacaaggaaattggccctgatggagatagttgtgctgtgtgcattgaattgtataaaccaaatgatttggtacgcatcttaacgtgcaaccatattttccataagacatgtgttgacccatggctgttagaacacaggacttgccccatgtgcaaatgtgacatactcaaagctttgggaattgaggtggatgttgaagatggatcagtgtctttacaagtccctgtatccaatgaaatatctaatagtgcctcctcccatgaagaggataatcgcagcgagaccgcatcatctggatatgcttcagtacagggaacagatgaaccgcctctggaggaacacgtgcagtcaacaaatgaaagtctacagctggtaaaccatgaagcaaattctgtggcagtggatgttattcctcatgttgacaacccaacctttgaagaagacgaaactcctaatcaagagactgctgttcgagaaattaaatcttaaaatctgtgtaaatagaaaacttgaaccattagtaataacagaactgccaatcagggcctagtttctattaataaattggataaatttaataaaataagagtgatactgaaagtgctcagatgactaatattatgctatagttaaatggcttaaaatatttaacctgttaacttttttccacaaactcattataatatttttcataggcaagtttcctctcagtagtgataacaacatttttagacattcaaaactgtcttcaagaagtcacgtttttcatttataacaattttcttataaaaacatgttgcttttaaaatgtggagtagctgtaatcactttattttatgatagtatcttaatgaaaaatactacttctttagcttgggctacatgtgtcagggtttttctccaggtgcttatattgatctggaattgtaatgtaaaaagcaatgcaaacttaggcgagtacttcttgaaatgtctatttaagctgctttaagttaatagaaaagattaaagcaaaatattcatttttactttttcttatttttaaaattaggctgaatgtacttcatgtgatttgtcaaccatagtttatcagagattatggacttaattgattggtatattagtgacatcaacttgacacaagattagacaaaaaattccttacaaaaatactgtgtaactatttctcaaacttgtgggatttttcaaaagctcagtatatgaatcatcatactgtttgaaattgctaatgacagagtaagtaacactaatattggtcattgatcttcgttcatgaattagtctacagaaaaaaaatgttctgtaaaattagtctgttgaaaatgttttccaaacaatgttactttgaaaattgagtttatgtttgacctaaatgggctaaaattacattagataaactaaaattctgtccgtgtaactataaattttgtgaatgcattttcctggtgtttgaaaaagaagggggggagaattccaggtgccttaatataaagtttgaagcttcatccaccaaagttaaatagagctatttaaaaatgcactttatttgtactctgtgtggcttttgttttagaattttgttcaaattatagcagaatttaggcaaaaataaaacagacatgtatttttgtttgctgaatggatgaaaccattgcattcttgtacactgatttgaaatgctgtaaatatgtcccaatttgtattgattctctttaaatataaaatgtaaataaaatattccaataaaagtttgtgtctggtgttagtttaa

SEQ ID NO: 295 - DNA, 2408 bp, Homo Sapiens
gcttgcaggctgctaaacccaaccgcagttgactagcacctgctaccgcgcctttgcttcctggcgcacgcggagcctcctggagcctgccaccatcctgcctactacgtgctgccctgcgcccgcagccatgtgccgcaccctggccgccttccccaccacctgcctggagagagccaaagagttcaagacacgtctggggatctttcttcacaaatcagagctgggctgcgatactgggagtactggcaagttcgagtggggcagtaaacacagcaaagagaatagaaacttctcagaagatgtgctggggtggagagagtcgttcgacctgctgctgagcagtaaaaatggagtggctgccttccacgctttcctgaagacagagttcagtgaggagaacctggagttctggctggcctgtgaggagttcaagaagatccgatcagctaccaagctggcctccagggcacaccagatctttgaggagttcatttgcagtgaggcccctaaagaggtcaacattgaccatgagacccacgagctgacgaggatgaacctgcagactgccacagccacatgctttgatgcggctcaggggaagacacgtaccctgatggagaaggactcctacccacgcttcctgaagtcgcctgcttaccgggacctggctgcccaagcctcagccgcctctgccactctgtccagctgcagcctggacgagccctcacacacctgagtctccacggcagtgaggaagccagccgggaagagaggttgagtcacccatccccgaggtggctgcccctgtgtgggaggcaggttctgcaaagcaagtgcaagaggacaaaaaaaaaaaaaaaaaaaaaaaaaatgcgctccagcagcctgtttgggaagcagcagtctctccttcagatactgtgggactcatgctggagaggagccgcccacttccaggacctgtgaataagggctaatgatgagggttggtggggctctctgtggggcaaaaaggtggtatgggggttagcactggctctcgttctcaccggagaaggaagtgttctagtgtggtttaggaaacatgtggataaagggaaccatgaaaatgagaggaggaaagacatccagatcagctgttttgcctgttgctcagttgactctgattgcatcctgttttcctaattcccagactgttctgggcacggaagggaccctggatgtggagtcttcccctttggccctcctcactggcctctgggctagcccagagtcccttagcttgtacctcgtaacactcctgtgtgtctgtccagccttgcagtcatgtcaaggccagcaagctgatgtgactcttgccccatgcgagatatttatacctcaaacactggcctgtgagccctttccaagtcagtggagagccctgaaaggaggctcacttgaatccagctcagtgctctgggtggccccctgcaggtggcccctgaccctgcgttgcagcagggtccacctgtgagcaggcccgccctggggcctcttcctggatgtgccctctctgagttctgtgctgtctcttggaggcagggcccaggagaacaaagtgtggaggcctcggggagtggcttttccagctctcatgccccgcagtgtggaacaaggcagaaaaggatcctaggaaataagtctcttggcggtccctgagagtcctgctgaaatccagccagtgttttttgtggtatgagaacaggcaaaaagagatgccccgagatagaaggggagccttgtgtttctttcctgcagacgtgagatgaacactggagtgggcagaggtggcccaggaccatggcacccttagagtgcagaagctggggggagaggctgcttcgaagggcaggactggggataatcagaacctgcctgtcacctcagggcatcactgaacaaacatttcctgatggcaactcctgcggcagagcccaggctggggaagtgaactacccagggcagcccctttgtggcccaggataatcaacactgttctctctgtaccatgagctcctccaggagattatttaagtgtattgtatcattggttttctgtgattgtcataacattgtttttgttattgttggtgctgttgttatttattattgtaatttcagtttgcctctactggagaatctcagcaggggtttcagcctgactgtctccctttctctaccagactctacctctgaatgtgctgggaacctcttggagcctgtcaggaactcctcactgtttaaatatttatttattgtgacaaatggagctggtttcctagatatgaatgatgtttgcaatccccattttcctgtttcagcatgttatattcttataaaataaaagcaaaagtcaaatatga

SEQ ID NO: 296 - DNA, 1736 bp, Homo Sapiens
tgctggcaggtggggcgcgggccggcgcgagctgaccgagcactcggcgggcgcggcgggactgcggcccgtggcggcgtgcgcggggacctgcgctgactaggtccggggaagtccctgctatgtggatatttggtagcaatgactgatgtggaaactacatatgcagattttattgcttcaggaagaacaggtagaagaaatgcaatacatgatatcctggtttcctctgcaagtggcaacagcaatgaattagccttgaaattagcaggtcttgatatcaacaagacagaaggtgaagaagatgcacaacgaagttctacagaacaaagtggggaagcccagggagaagcagcaaaatctgaaagctaacaccccactttgaccctcgaccacacctgaaaatgtctcaaatctccaggagtatctggaatgcatttgtttccatgagtgaaaagaggaaaaagaaaatggctgtgctgcattgcaggaacctgctcattatcatgttaaaaatgagggcagaggctgtggctgcaggcagacttttccctacctctgtcattagcaatggttgaaatcatgtggcttgtgtttgggcgtcatttttgtatggatcctttcacttgatcatatgacgaaatgcttatagagagtagctccgacctagatgatgattcttcctgtagcatctggcccctcacaatgtcagaggatttaattgtgtctaattgcgaagggttgattgaaccccagagtttaaatatctctggctcaagtgttcacccagtaaaagaaagatccagaaagcactgtttttagcattacgtatctgtgtgttactgctgtgttatttacactgttttgtattgtacaatatatatgctcagcactgcccccttctctgattgcttatgaaaaacaaaatgatgtacattactgtgaatttttataccactcatttttaaaagggctgtcttttcattttagttttccatactgtggtggtgtacacaggatagaacacccttttttaaaacacagtctttccccttgctcattgtatgttgatgagttgattaagtctaacagattcatcaagactccattgctttattatagagacatttgaaaatatccattaatgtgaatatcacctgaattcagtctgtttggtgtctgcacagactggaattcaatctgtcaaatttgttttattctcaagtggagaacttctcccacataatatatatatatatatatattttaatttatgagaattttggacaattggaaaggtagaaaagaaaagccaagatcatactaaggactggaaatattttgttctatggaatcaaatttctcacaatgctgtatgatactatttaaatttggaggacaacttatcttcactaagctgaatcaggtggagaaagtaatctccttgcaatcatgtggacaccaatcacaaaagtaaagccctggtgttgtgttttcatgtcttttttcagccctctcagatccaaatgttattatgcactttttaatgtttgtaaacttttactaataattagtgtgaattgcattctgatacaataatgattatcattagaagctaacaaaattctcattaatactgtgtttgatggcctctgctgtgttttaacatcgtgcttcttatatggaaagtttttgtgagctgtgtaatccctctggtcagtattatgaaatcattt

SEQ ID NO: 297 - DNA, 867 bp, Homo Sapiens
agaagcagcagcagatgcacatcgtggacatgctgagcaaggagatccaggagctccagagcaaaccggaccgcagcgccgaggagagcgaccggctgcgcaagctcatgctggagtggcagttccagaagagactccaggagtcgaagcagaaggacgaagatgacgaggaggaggaggacgatgatgtggacaccatgctgatcatgcagcgcctggaggctgaacgaagagcgaggttgcaggacgaggagcggaggcggcagcagcagttagaagagatgcgcaagcgggaagcggaagaccgagcgaggcaagaggaagagcgccggcggcaggaggaggagcgaacaaaacgagacgctgaagaaaaggttatggtcctttaagggcagctagaattttaccaagttagcctgaacgtaatcgattggctggggcagagcgggctggaagttctgtgtttcttaagaagcacgaggcagagcagggcctggctcccccagctttgtgattggacctgcaactttaccccatctggcccacctacctctcttctggactgtctccagatccccttatctgccaagttttgtctccttcaaacttctgaactcttgggcgtgtgtagcagtgagcctctttgcaaagggttcgtttcctcgggcactcatctttactgaacatggcccagcttgtcattgtgaaggtgacattggttcagtgattgcttaaatggcatgtggaccgtgggaagcagtaggagcgtagtaagacagttggctgccattcaacatttcaaatagatggtttactcaaatcactcacttctggttgatggtaaagagagcagatggcttagaaaac

SEQ ID NO: 298 - DNA, 6227 bp, Homo Sapiens
gcgcttgtttttcccttgggacccgggtccacacggcggggtcgcccgtccatctccggctcgcccgcggggcccatcgtcgacgttagcggccgttctccgagccgactgacccatccttggcgctgccgccgcgcgcttgttctcctccctcgccccgccttcatcctccccgttcacggaaacgacagctgcggctgcggggctggcgccgcctccctccacctaccacgtctgccctcgccgctctagccctgcgccccagcccggccgcggcacctccgcctcgccgccgctaggtcggccggctccgcccggctgccgcctaggatgaatatcatggacttcaacgtgaagaagctggcggccgacgcaggcaccttcctcagtcgcgccgtgcagatgccaggatagaagaatttgtttatgagaaactggatagaaaagctccaagtcgtataaacaacccagaacttttgggacaatatatgattgatgcagggactgagtttggcccaggaacagcttatggtaatgcccttattaaatgtggagaaacccaaaaaagaattggaacagcagacagagaactgattcaaacgtcagccttaaattttcttactcctttaagaaactttatagaaggagattacaaaacaattgctaaagaaaggaaactattgcaaaataagagactggatttggatgctgcaaaaacgagactaaaaaaggcaaaagctgcagaaactagaaattcatctgaacaggaattaagaataactcaaagtgaatttgatcgtcaagcagagattaccagacttctgctagagggaatcagcagtacacatgcccatcaccttcgctgtctgaatgactttgtagaagcccagatgacttactatgcacagtgttaccagtatatgttggacctccagaaacaactgggaagttttccatccaattatcttagtaacaacaatcagacttctgtgacacctgtaccatcagttttaccaaatgcgattggttcttctgccatggcttcaacaagtggcctagtaatcacctctccttccaacctcagtgaccttaaggagtgtagtggcagcagaaaggccagggttctctatgattatgatgcagcaaacagtactgaattatcacttctggcagatgaggtgatcactgtgttcagtgttgttggaatggattcagactggctaatgggggaaaggggaaaccagaagggcaaggtgccaattacctacttagaactgctcaattaagtaggtggactatggaaaggttgcccatcatgactttgtatttatatacaattaactctaaataaagcaggttaagtatcttccatgttaatgtgttaagagactgaaaataccagccatcagaaactggcctttctgccaataaagttgcatggtaaatatttcattacagaatttatgttagagctttcatgccaagaatgttttcttacaaaattctctttttattgaggtttcactaataagcagcttctacttttgagcctcaacttaaagcagaactgttttctactggatttttcattaacagcaagctttttcttttatgtaaaataaatctattgtgaattgatatcagcgactcatttattaggtataaataatagccaaagaataaaattaaaatttattttaaactttcggtcttaaaaagagctgtaggatataaacctcttttgtgaaaagtagaattttctgaatgctttcatagacaaaaacgcatttaaactatgtttacctggttttccaacagaaatcaaatgattttaatattatgttttgatgggttattttcagagttgtttggttttttaaacactactgaatggtttcttttaaatttaagaacaactagttcttgaaaagcaataccgtatttctctgataaatttgtagttaaggttctagaaaatctaggacaaatttacttcattaaacataaagtttttaagattattcagttggcacaatttaatgcataattgggattggatccatttactgtactgtggtacagtaaagagaatgtgttcttattgaacagcagatttgtatacaaatacggaataatgcaactacattataaattgtatacgaacaaaataaattgggtcactctgagcttactattaaaacattgaaaatttattaatgaacacaggctatcttgatgaggatctctgcttatgaaacacatactaatgaaattattagtgacacattggaagctagaaaattgctgttggggccattgctataaatcattgtttccatgttaagacttctgttctaattcattcattcaacaaacatttgttgagggccagatactgtgctggtcaactggggatactgtcctgaacaatatgcacacagttcttgcccctgcagagcttaaagaccattaaaggatacagaaaattaagcaattatcctatagtaggattcgtggtgtgatggggaaaatacaaggtactgtatttgggagtcatgtaactccagttttgggagtgagagagggtctggggaagaactgttccagataaaaagatgtgtaaccaagatagcatagcacattctgacaactaaagcaatttactctaacttaagcatgaagtacaaaagtatagttcatttattgagggaatgttaagctattaaaatgatactttttggtacttttaaaaaaatgaatacttaaacaccgttttaaaattttgtgttaagagctcctaataagaacttggtaaacatgttgacaatttaactcacagtctaaactttaaaagtagtagttacccttttatttctgtgccatgagacaaattcttctgcagttttatagttgtacaagatgttttgactcactctcaattgccatattcttaaagaaaccctgaaaagctgctcaagctggtcagttttctgtaaaaccaagtaaatgaaattttctctcccctcagaaaggaagttctacagcctagagtaccatctattgtgttttataagtccagatttaggctttgaaagatcataccaaaacttcagatcgacttaaacagcaactatgaattaggtttatgggaaatgtagtaatacaggggaaagaatatcggtaatggagtgaaatggtcctgggttcaaatccagtcttcctcacatattgtgctctttaagcttcaaatgagatgtataactgccttttccttaccagtaaaatgaggacaataattatgacaccatagggtggttgtgaggattagcaaatgttatcttgtatttcaggtgcctttcagggaaaggcttggcacatagtaaacacatcctgtaaatatcagtttccccttgttagcccctgtagcatcctgacctaccaagtctataggccttgcatatcactgtgcaccagagatacctcttttacatctgggctctgttttctctctatcaatcctatcctccaccctctttaaatcagaccccaggtttaaccttcccacagtcagtataaatcatttttcagaactttcagctttccatcaagtgaaagttgattttagttacccagtaatgtacagaaaccttcaataatgttaagcttcaaaggcttctggtacgtttgtctaccacagaaccaccacaatatatatgcttgttcttaggtttattgctttttattttaatggggtttggttgtttgggttttattttggttttggcttattttaaagtcaagtttagtttttactcaggtaaaggcctgaagtttcttgggcgtggaagaaaaagcttgggaagcctattaattcatggtgcagttcagaattgtttaaataagctctgtgccactgagcttaatctgaaagtatagtgacatgtgaaggatgcacatatgaatgaaaaactaaaataattgtaggctcttctataaatgaaaaaaaaagtgattggattgtgtctacctttttcctcaaagtaatctaacctaaacggtcatggtgttaaaactttttatggtgctaatcagaaaaattgatgttgcaagaaatgaggtctcaaaaatgggaatgtgcctcctcactctgcgtcacatgggaaataaatcctgaggccaggatcaccagtggggtagagtcatcttcatagtctcctgttatcctccccctgaacaaagaacaaagtgagactgggaagctagtgttggggaaacatttctgggataaactgtggagtggagaagacaatggagggcaaggcaaaaacccacagacttgtttacccatagaggccccactcacctccatgctgacagaattccagaaaaattccttccctatctcccaaacacctgaaattctgaaatattgccctactatttagcactttaagcttcagtgaggtgctgtaatggagagatagcttcatagtttagcctatagccaactttgcctcaagacctccagataagatgaagtggcttttacctcatgtgagtctcaaacgctggagagagagttccacaaccacccctgccctttctcccatattacgctcattagaaagtctactcagggctgggtgccgtggctcatgcctgtaatcccagcactttggaggctgaggcgggtggatcatctgaggtcaggagttcgagaccagcctggccaacatggggaaaccctgtctctactgaaaatataaaaattagccgggcatggtggcgtgcacctgtaattccagctactcgggaggctgaggcaggagaatcacttgaaccccagaggcagaggctacagtgagccaagattgcaccactgcactccaacctgggtgatagaataagactcttgtctcaaggaaagaaaaaatgtctactcagtagagcagtgattggcaaagtgtgagaccccagaccggcaatattggcatctcctggagacttgtttaaaatgctgattactattttcaagaactttctaccttcatttttacttattttttgttttcaagggctcatggaatcagtcttccatgtgacagctttttaaatattttaagacaaaaactgagtcttctaatcttaattgtgttctagcagtagtcattgtaattatagttatttttataatttatttgtttagtgtatatctgtcactctagaatgtaggctccctgagataaaaactataattcttttgatggcagttacattcccaactcttagcacaagatctaggacatagtatgaactcaataaatttttgttgaatgaaagaaaaatgcaaatttataagccttttcagagacctactgaatcaaactctgagagtggagcccagcaatctgttgtaaaagctgtttgagtaatactgttgcactctaagcttgagaaccactgcaatagaactaagagaacattcatttcaccttcaggcctattctctgacatcacttgaaaaatcctctctgccttctgtaacccttaaccaacaacagtgccctgtccatgtaggggaaacttctgggctgtattacaagtgggtaggaaggtataaggatatcatagtgggaagtattgcttagaatgccagtacttgtttgctgtggaaggtttctaggaatggattgcttagtctaaagtaagcactaccaccatccacgttttcactcaacacagtgccttttaattggtgactaacatcaaaacaccttgacaaaccgttaaaacagtatcagaaaccatgtgtacatccctgtgcctcttagattgctaagttctgctctcattcttacttcaaaggacactttttaaagaattgttaatgcttttttataatacaagtcatagccctgttggcaaaaagaaaaaagattcagtgagaaagaaaaatcactgataattccatcatccagggagaaccactgttatttaagtatatggccttccagacttttctgtgcatttatagatatttttaatgggatcaaagtgtacatactgttttgtaactttttttcactcaacaataccatgactgtcttgctgtgtcaagtatatttctacatctcttaatggctgcatgatattccatcatatgtgccacattttattaaactactgttcaatttttaggtttccaactttcattaataaagtgcttt

SEQ ID NO: 299 - DNA, 791 bp, Homo Sapiens
gcgcgcacatgtaggcgttccgagcggcggcggaggtgagcgcacggacgagcgggagggacccttctccggcctgatgcgacccggtaacgcgttcagactgcggagtagcctaggggcccagagtggaagcgtagcgaggacccctctgcggggctcctgcagcccctcctcccccagccaccggcgggctgcatggtactgtgttctaggcccaccccgcagcgcgatggccctagggacgttggactttggtccagacctttcctttcttagcctcactttccgcattgggaaaaaaaaaaagcccgaatgataatgattcttataggagttcttgattaagataggccaagcggtaccctgcgtttttgtttgcggcaactcattcgttgctcattaagcacttttcacggacaggaatacaattgtccgcagtgactacactcatggcaggtcccctgtggcggaccgcagcatttgtgcagagacacaggacaggcctcttggtgggttcctgtgcaggcctgtttggagttccaatctcgtaccacctcttcccggatcccgtggtccaatggctctaccagtactggcctcagggccagccagctccgctccctccacagctgcagagcctcttccaagaggtgctacaggacataggtgttccttcaggccattgctacaagcccttcaccaccttcaccttccaacctgtgagtgcaggcttcccaagactccctgctggggctgtggtgggcatccctgccagtttcttgggagaccta

SEQ ID NO: 300 - DNA, 2185 bp, Homo Sapiens
gttcgcggccttcctgtaagaaagatccacggccgggcccgggcggccccgcttcccaggcaggcgggcggcacggggcggcgggtcgggcagtggggaagcggggaggaagccaggcgacctgctctgcgcttctttgttcccctctagggtgacggagctgctccccccgttccagagactcatccagccggaggagatgtggctctaccggaacccctacgtggaggcggagtatttccccaccaagccgatgtttgttattgcatttctctctccactgtctctgatcttcctggccaaatttctcaagaaggcagacacaagagacagcagacaagcctgcctggctgccagccttgccctggctctgaatggcgtctttaccaacacaataaaactgatcgtagggaggccacgcccagatttcttctaccgctgcttccctgatgggctagcccattctgacttgatgtgtacaggggataaggacgtggtgaatgagggccgaaagagcttccccagtggacattcttcctttgcatttgctggtctggcctttgcgtccttctacctggcagggaagttacactgcttcacaccacaaggccgtgggaaatcttggaggttctgtgcctttctgtcacctctactttttgcagctgtgattgcactgtcccgcacatgtgactacaagcatcactggcaagatgtactagttggatccatgattggaatgacatttgcctatgtctgctatcggcagtattatcctcctctgactgatgcagaatgccataaaccatttcaagacaaacttgtactttccactgcacagaagcctggggattcttattgttttgatatttaaaaattgaatctggccgggcgtggtggctcatgcctgtaatcccaacactttgggaggctgaggagggtggatcacctgaggtcaggaccagcctggccaacatggtgaaccctgtctctactaaaaatacaaaaattagccaggagttgtgtgccgtaatcccagctacctgggaggctgaggtaggagaattgcttgaacctgggagctggaggttccagtgagccgagatcgcaccactgcactccagcctaggcaacagagtgagaccccatctcaaaaaaaaaaaaaattgaatctatctcaatagagaacaggtgaactagccctcctaaccggaccatgcacaagacaagaaattctagcctttttttccccttccaaggtgcaagtgaggacataagccacactgtattctgcctccaaatgattacacacttttgcccctgctcatctatcttgaggagttacggttcttttccactactgtatgccacatgttctagtaaaaggatctttcaaaggtgtccaacaccttatgaatctggtctatcagattaatatctgaagatctacagtgtttttacatttaatttaaatgccattcttagaaggatcttgtcacaaagaagcctttacatagccccaccttgtctcagaagctagagttcattatcaaaacttaatttccatttcatatagctcaaaatcttaaaatctagggcatggccaactaaattactttgattctgtttaccttctctgatgacaattccatcaagccttaaataggaaaatgtcgaatctagggtaatttatcacttttgtgtgcatcttatctgagtccagccatctggtactgctgtgcattttgaacaccgtgggcataaacaatttgttgaattactaagtgaaaacaataataaagaagaaaatggtcaggagtgtggtttcagcactactaacagatgactgtttctacctcatttgaccataactgtacttgtgagcttctttccttccattcatgactgaagatctgctcaaatgcaccaacactgccaagtgactaaggtagaaaagaaaaatgacaggtatcgtcatctgaaggacagatgaatctttttctgccccttcttcacaatggaatataaggaacaattatgggatgtcatcagaatggatgccataggacctacagctccctttctctttattgtgattatactttaaatatgacattgtcttttatgtgtatgttcctatattttcaatgtatctttttccttcagtaaacctgatattcaaataaaa

SEQ ID NO: 301 - DNA, 2704 bp, Homo Sapiens
ggcaatagcagaataggagcaagccagcactagtcagctaactaagtgactcaaccaaggccttttttccttgttatctttgcagatacttcattttcttagcgtttctggagattacaacatcctgcggttccgtttctgggaactttactgatttatctcccccctcacacaaataagcattgattcctgcatttctgaagatctcaagatctggactactgttgaaaaaatttccagtgaggctcacttatgtctgtaaagatgggaaaaaaatacaagaacattgttctactaaaaggattagaggtcatcaatgattatcattttagaatggttaagtccttactgagcaacgatttaaaacttaatttaaaaatgagagaagagtatgacaaaattcagattgctgacttgatggaagaaaagttccgaggtgatgctggtttgggcaaactaataaaaattttcgaagatataccaacgcttgaagacctggctgaaactcttaaaaaagaaaagttaaaagtaaaaggaccagccctatcaagaaagaggaagaaggaagtggatgctacttcacctgcaccctccacaagcagcactgtcaaaactgaaggagcagaggcaactcctggagctcagaaaagaaaaaaatcaaccaaagaaaaggctggacccaaagggagtaaggtgtccgaggaacagactcagcctccctctcctgcaggagccggcatgtccacagccatgggccgttccccatctcccaagacctcattgtcagctccacccaacagttcttcaactgagaacccgaaaacagtggccaaatgtcaggtaactcccagaagaaatgttctccaaaaacgcccagtgatagtgaaggtactgagtacaacaaagccatttgaatatgagaccccagaaatggagaaaaaaataatgtttcatgctacagtggctacacagacacagttcttccatgtgaaggttttaaacaccagcttgaaggagaaattcaatggaaagaaaatcatcatcatatcagattatttggaatatgatagtctcctagaggtcaatgaagaatctactgtatctgaagctggtcctaaccaaacgtttgaggttccaaataaaatcatcaacagagcaaaggaaactctgaagattgatattcttcacaaacaagcttcaggaaatattgtatatggggtatttatgctacataagaaaacagtaaatcagaagaccacaatctacgaaattcaggatgatagaggaaaaatggatgtagtggggacaggacaatgtcacaatatcccctgtgaagaaggagataagctccaacttttctgctttcgacttagaaaaaagaaccagatgtcaaaactgatttcagaaatgcatagttttatccagataaagaaaaaaacaaacccgagaaacaatgaccccaagagcatgaagctaccccaggaacagcgtcagcttccatatccttcagaggccagcacaaccttccctgagagccatcttcggactcctcagatgccaccaacaactccatccagcagtttcttcaccaagaaaagtgaagacacaatctccaaaatgaatgacttcatgaggatgcagatactgaaggaagggagtcattttccaggaccgttcatgaccagcataggcccagctgagagccatccccacactcctcagatgcctccatcaacaccaagcagcagtttcttaaccacgttgaaaccaagactgaagactgaacctgaagaagtttccatagaagacagtgcccagagtgacctcaaagaagtgatggtgctgaacgcaacagaatcatttgtatatgagcccaaagagcagaagaaaatgtttcatgccacagtggcaactgagaatgaagtcttccgagtgaaggtttttaatattgacctaaaggagaagttcaccccaaagaagatcattgccatagcaaattatgtttgccgcaatgggttcctggaggtatatcctttcacacttgtggctgatgtgaatgctgaccgaaacatggagatcccaaaaggattgattagaagtgccagcgtaactcctaaaatcaatcagctttgctcacaaactaaaggaagttttgtgaatggggtgtttgaggtacataagaaaaatgtaaggggtgaattcacttattatgaaatacaagataatacagggaagatggaagtggtggtgcatggacgactgaccacaatcaactgtgaggaaggagataaactgaaactcacctgctttgaattggcaccgaaaagtgggaataccggggagttgagatctgtaattcatagtcacatcaaggtcatcaagaccaggaaaaacaagaaagacatactcaatcctgattcaagtatggaaacttcaccagactttttcttctaaaatctggatgtcattgacgataatgtttatggagataaggtctaagtgcctaaaaaaatgtacatatacctggttgaaatacaacactatacatacacaccaccatatatactagctgttaatcctatggaatggggtattgggagtgcttttttaatttttcatagtttttttttaataaaatggcatattttgcatctacaacttctataatttgaaaaaataaataaacattatcttttttgtgaaa

SEQ ID NO: 302 - DNA, 2495 bp, Homo Sapiens
gtcgccgtctccgcctcgccgcagtcggggcagccgctcgcccctcttttccatgtatccgtccaggatcccatgacagattctgttgtcacgtctccttacagagtttgagcggtgctgaactgtcagcaccatctgtccggtcccagcatgccttctgagaccccccaggcagaagtggggcccacaggctgcccccaccgctcagggccacactcggcgaaggggagcctggagaaggggtccccagaggataaggaagccaaggagcccctgtggatccggcccgatgctccgagcaggtgcacctggcagctgggccggcctgcctccgagtccccacatcaccacactgccccggcaaaatctccaaaaatcttgccagatattctgaagaaaatcggggacacccctatggtcagaatcaacaagattgggaagaagttcggcctgaagtgtgagctcttggccaagtgtgagttcttcaacgcgggcgggagcgtgaaggaccgcatcagcctgcggatgattgaggatgctgagcgcgacgggacgctgaagcccggggacacgattatcgagccgacatccgggaacaccgggatcgggctggccctggctgcggcagtgaggggctatcgctgcatcatcgtgatgccagagaagatgagctccgagaaggtggacgtgctgcgggcactgggggctgagattgtgaggacgcccaccaatgccaggttcgactccccggagtcacacgtgggggtggcctggcggctgaagaacgaaatccccaattctcacatcctagaccagtaccgcaacgccagcaaccccctggctcactacgacaccaccgctgatgagatcctgcagcagtgtgatgggaagctggacatgctggtggcttcagtgggcacgggcggcaccatcacgggcattgccaggaagctgaaggagaagtgtcctggatgcaggatcattggggtggatcccgaagggtccatcctcgcagagccggaggagctgaaccagacggagcagacaacctacgaggtggaagggatcggctacgacttcatccccacggtgctggacaggacggtggtggacaagtggttcaagagcaacgatgaggaggcgttcacctttgcccgcatgctgatcgcgcaagaggggctgctgtgcggtggcagtgctggcagcacggtggcggtggccgtgaaggccgcgcaggagctgcaggagggccagcgctgcgtggtcattctgcccgactcagtgcggaactacatgaccaagttcctgagcgacaggtggatgctgcagaagggctttctgaaggaggaggacctcacggagaagaagccctggtggtggcacctccgtgttcaggagctgggcctgtcagccccgctgaccgtgctcccgaccatcacctgtgggcacaccatcgagatcctccgggagaagggcttcgaccaggcgcccgtggtggatgaggcgggggtaatcctgggaatggtgacgcttgggaacatgctctcgtccctgcttgccgggaaggtgcagccgtcagaccaagttggcaaagtcatctacaagcagttcaaacagatccgcctcacggacacgctgggcaggctctcgcacatcctggagatggaccacttcgccctggtggtgcacgagcagatccagtaccacagcaccgggaagtccagtcagcggcagatggtgttcggggtggtcaccgccattgacttgctgaacttcgtggccgcccaggagcgggaccagaagtgaagtccggagcgctgggcggtgcggagcgggcccgccacccttgcccacttctccttcgctttcctgagccctaaacacacgcgtgattggtaactgcctggcctggcaccgttatccctgcacacggcacagagcatccgtctcccctcgttaacacatggcttcctaaatggccctgtttacggcctatgagatgaaatatgtgattttctctaatgtaacttcctcttaggatgtttcaccaaggaaatattgagagagaagtcggccaggtaggatgaacacaggcaatgactgcgcagagtggattaaaggcaaaagagagaagagtccaggaaggggcggggagaagcctgggtggctcagcatcctccacgggctgcgccgtctgctcggggctgagctggcgggagcagtttgcgtgtttgggttttttaattgagatgaaattcaaataacctaaaaatcaatcacttgaaagtgaacaatcagcggcatttagtacatccagaaagttgtgtaggcaccacctctgtcacgttctggaacattctgtcatcaccccgtgaagcaatcatttcccctcccgtcttcctcctcccctggcaactgctgatcgactttgtgtctctgttgtctaaaataggttttccctgttctggacatttcatataaatggaatcacacaa

SEQ ID NO: 303 - DNA, 1658 bp, Homo Sapiens
aattcttggaagaggagaactggacgttgtgaacagagttagctggtaaatgtcctcttaaaagatccaaaaaatgagacttctagcaaagattatttgccttatgttatgggctatttgtgtagcagaagattgcaatgaacttcctccaagaagaaatacagaaattctgacaggttcctggtctgaccaaacatatccagaaggcacccaggctatctataaatgccgccctggatatagatctcttggaaatgtaataatggtatgcaggaagggagaatgggttgctcttaatccattaaggaaatgtcagaaaaggccctgtggacatcctggagatactccttttggtacttttacccttacaggaggaaatgtgtttgaatatggtgtaaaagctgtgtatacatgtaatgaggggtatcaattgctaggtgagattaattaccgtgaatgtgacacagatggatggaccaatgatattcctatatgtgaagttgtgaagtgtttaccagtgacagcaccagagaatggaaaaattgtcagtagtgcaatggaaccagatcgggaataccattttggacaagcagtacggtttgtatgtaactcaggctacaagattgaaggagatgaagaaatgcattgttcagacgatggtttttggagtaaagagaaaccaaagtgtgtggaaatttcatgcaaatccccagatgttataaatggatctcctatatctcagaagattatttataaggagaatgaacgatttcaatataaatgtaacatgggttatgaatacagtgaaagaggagatgctgtatgcactgaatctggatggcgtccgttgccttcatgtgaagaaaaatcatgtgataatccttatattccaaatggtgactactcacctttaaggattaaacacagaactggagatgaaatcacgtaccagtgtagaaatggtttttatcctgcaacccggggaaatacagcaaaatgcacaagtactggctggatacctgctccgagatgtaccttgaaaccttgtgattatccagacattaaacatggaggtctatatcatgagaatatgcgtagaccatactttccagtagctgtaggaaaatattactcctattactgtgatgaacattttgagactccgtcaggaagttactgggatcacattcattgcacacaagatggatggtcgccagcagtaccatgcctcagaaaatgttattttccttatttggaaaatggatataatcaaaatcatggaagaaagtttgtacagggtaaatctatagacgttgcctgccatcctggctacgctcttccaaaagcgcagaccacagttacatgtatggagaatggctggtctcctactcccagatgcatccgtgtcagctttaccctctgaacttctgatcgaaggtcatccctctccagcttgagtggatcaaagatgacaagggccaatggaaccaagtttgagtcttgccaggtcaatacttgggtcctgagtatggtgactagtatctgttttgttatgtgtgtattattccagccagaatgggaaatgctaattcagctcctccaggcagcccaatggggctggtggctttgagattattaaactctttctctgctgcaaa

SEQ ID NO: 304 - DNA, 659 bp, Homo Sapiens
tggatgagggaaaggaggtaagatctgtaatgaataagcaggaactttgaagactcagtgactcacctctcccacaggtaccatgaaggtctccgcggcagccctcgctgtcatcctcattgctactgccctctgcgctcctgcatctgcctccccatattcctcggacaccacaccctgctgctttgcctacattgcccgcccactgccccgtgcccacatcaaggagtatttctacaccagtggcaagtgctccaacccagcagtcgtctttgtcacccgaaagaaccgccaagtgtgtgccaacccagagaagaaatgggttcgggagtacatcaactctttggagatgagctaggatggagagtccttgaacctgaacttacacaaatttgcctgtttctgcttgctcttgtcctagcttgggaggcttcccctcactatcctaccccacccgctccttgaagggcccagattctaccacacagcagcagttacaaaaaccttccccaggctggacgtggtggctcacgcctgtaatcccagcactttgggaggccaaggtgggtggatcacttgaggtcaggagttcgagaccagcctggccaacatgatgaaaccccatctctactaaaaatacaaaaaattagccgggcgtg

SEQ ID NO: 305 - DNA, 5829 bp, Homo Sapiens
ctttcctagagtctctgaagccacagatctcttaagaactttctgtctccaaaccgtggctgctcgataaatcagacagaacagttaatcctcaatttaagcctgatctaacccctagaaacagatatagaacaatggaagtgacaacaagattgacatggaatgatgaaaatcatctgcgcaagctgcttggaaatgtttctttgagtcttctctataagtctagtgttcatggaggtagcattgaagatatggttgaaagatgcagccgtcagggatgtactataacaatggcttacattgattacaatatgattgtagcctttatgcttggaaattatattaatttacatgaaagttctacagagccaaatgattccctatggttttcacttcaaaagaaaaatgacaccactgaaatagaaactttactcttaaatacagcaccaaaaattattgatgagcaactggtgtgtcgtttatcgaaaacggatattttcattatatgtcgagataataaaatttatctagataaaatgataacaagaaacttgaaactaaggttttatggccaccgtcagtatttggaatgtgaagtttttcgagttgaaggaattaaggataacctagacgacataaagaggataattaaagccagagagcacagaaataggcttctagcagacatcagagactataggccctatgcagacttggtttcagaaattcgtattcttttggtgggtccagttgggtctggaaagtccagttttttcaattcagtcaagtctatttttcatggccatgtgactggccaagccgtagtggggtctgatatcaccagcataaccgagcggtataggatatattctgttaaagatggaaaaaatggaaaatctctgccatttatgttgtgtgacactatggggctagatggggcagaaggagcaggactgtgcatggatgacattccccacatcttaaaaggttgtatgccagacagatatcagtttaattcccgtaaaccaattacacctgagcattctacttttatcacctctccatctctgaaggacaggattcactgtgtggcttatgtcttagacatcaactctattgacaatctctactctaaaatgttggcaaaagtgaagcaagttcacaaagaagtattaaactgtggtatagcatatgtggccttgcttactaaagtggatgattgcagtgaggttcttcaagacaactttttaaacatgagtagatctatgacttctcaaagccgggtcatgaatgtccataaaatgctaggcattcctatttccaatattttgatggttggaaattatgcttcagatttggaactggaccccatgaaggatattctcatcctctctgcactgaggcagatgctgcgggctgcagatgattttttagaagatttgcctcttgaggaaactggtgcaattgagagagcgttacagccctgcatttgagataagttgccttgattctgacatttggcccagcctgtactggtgtgccgcaatgagagtcaatctctattgacagcctgcttcagattttgcttttgttcgttttgccttctgtccttggaacagtcatatctcaagttcaaaggccaaaacctgagaagcggtgggctaagataggtcctactgcaaaccacccctccatatttccgtaccatttacaattcagtttctgtgacatctttttaaaccactggaggaaaaatgagatattctctaatttattcttctataacactctatatagagctatgtgagtactaatcacattgaataatagttataaaattattgtatagacatctgcttcttaaacagattgtgagttctttgagaaacagcgtggattttacttatctgtgtattcacagagcttagcacagtgcctggtaatgagcaagcatacttgccattacttttccttcccactctctccaacatcacattcactttaaatttttctgtatatagaaaggaaaactagcctgggcaacatgatgaaaccccatctccactgcaaaaaaaaaaaaaaaaaataagaaagaacaaaacaaaccccacaaaaattagctgggtatgatggcacgtgcctgtagtcccagttactcaggatgattgattgagccttggaggtggaggctacagtgagctgagattgtgccactgtactctagccagggagaaagagtgagatcctggctcaaaaaaaccaaataaaacaaaacaaacaaacgaaaaacagaaaggaagactgaaagagaatgaaaagctggggagaggaaataaaaataaagaaggaagagtgtttcatttatatctgaatgaaaatatgaatgactctaagtaattgaattaattaaaatgagccaacttttttttaacaatttacattttatttctatgggaaaaaataaatattcctcttctaacaaacccatgcttgattttcattaattgaattccaaatcatcctagccatgtgtccttccatttaggttactggggcaaatcagtaagaaagttcttatatttatgctccaaataattctgaagtcctcttactagctgtgaaagctagtactattaagaaagaaaacaaaattcccaaaagatagctttcacttttttttttccttaaagacttcctaattctcttctccaaattcttagtcttcttcaaaataatatgctttggttcaatagttatccacattctgacagtctaatttagttttaatcagaattatactcatcttttgggtagtcatagatattaagaaagcaagagtttcttatgtccagttatggaatatttcctaaagcaaggctgcaggtgaagttgtgctcaagtgaatgttcaggagacacaattcagtggaagaaattaagtctttaaaaaagacctaggaataggagaaccatggaaattgaggaggtaggcctacaagtagatattgggaacaaaattagagaggcaaccagaaaaagttattttaggctcaccagagttgttcttattgcacagtaacacaccaatataccaaaacagcaggtattgcagtagagaaagagtttaataattgaatggcagaaaaatgaggaaggttgaggaaacctcaaatctacctccctgctgagtctaagtttaggatttttaagagaaaggcaggtaaggtgctgaaggtctggagctgctgatttgttggggtatagggaatgaaatgaaacatacagagatgaaaactggaagtttttttttgtttgttttgttttttttttgttgttgtttttttttttttttgtttttttgctgagtcaattccttggagggggtcttcagactgactggtgtcagcagacccatgggattccaagatctggaaaactttttagatagaaacttgatgtttcttaacgttacatatattatcttatagaaataactaagggaagttagtgccttgtgaccacatctatgtgacttttaggcagtaagaaactataaggaaaggagctaacagtcatgctgtaagtagctacagggaattggcttaaagggcaagttggttagtacttagctgtgtttttattcaaagtctacattttatgtagtggttaatgtttgctgttcattaggatggtttcacagttaccatacaaatgtagaagcaacaggtccaaaaagtagggcatgattttctccatgtaatccagggagaaaacaagccatgaccattgttggttgggagactgaaggtgattgaaggttcaccatcatcctcaccaacttttgggccataattcacccaaccctttggtggagcctgaaaaaaatctgggcagaatgtaggacttctttattttgtttaaaggggtaacacagagtgcccttatgaaggagttggagatcctgcaaggaagagaaggagtgaaggagagatcaagagagagaaacaatgaggaacatttcatttgacccaacatcctttaggagcataaatgttgacactaagttatcccttttgtgctaaaatggacagtattggcaaaatgataccacaacttcttattctctggctctatattgctttggaaacacttaaacatcaaatggagttaaatacatatttgaaatttaggttaggaaatattggtgaggaggcctcaaaaagggggaaacatcttttgtctgggaggatattttccattttgtggatttccctgatctttttctaccaccctgaggggtggtgggaattatcattttgctacattttagaggtcatccaggatttttgaaactttacattctttacggttaagcaagatgtacagctcagtcaaagacactaaattcttcttagaaaaatagtgctaaggagtatagcagatgacctatatgtgtgttggctgggagaatatcatcttaaagtgagagtgatgttgtggagacagttgaaatgtcaatgctagagcctctgtggtgtgaatgggcacgttaggttgttgcattagaaagtgactgtttctgacagaaatttgtagctttgtgcaaactcacccaccatctacctcaataaaatatagagaaaagaaaaatagagcagtttgagttctatgaggtatgcaggcccagagagacataagtatgttcctttagtcttgcttcctgtgtgccacactgcccctccacaaccatagctgggggcaattgtttaaagtcattttgttcccgactagctgccttgcacattatcttcattttcctggaatttgatacagagagcaatttatagccaattgatagcttatgctgtttcaatgtaaattcgtggtaaataacttaggaactgcctcttctttttctttgaaaacctacttataactgttgctaataagaatgtgtattgttcaggacaacttgtctccatacagttgggttgtaaccctcatgcttggcccaaataaactctctacttatatcagtttttcctacacttcttccttttaggtcaacaataccaagaggggttactgtgctgggtaatgtgtaaacttgtgtcttgtttagaaagataaatttaaagactatcacattgctttttcataaaacaagacaggtctacaattaatttattttgacgcaaattgataggggggccaagtaagccccatatgcttaatgatcagctgatgaataatcatctcctagcaacataactcaatctaatgctaaggtacccacaagatggcaaggctgatcaaagtcgtcatggaatcctgcaaccaaaagccatgggaatttggaagccctcaaatcccattcctaatctgatgagtctatggaccaatttgtggaggacagtagattaaatagatctgatttttgccatcaatgtaaggaggataaaaacttgcataccaattgtacacccttgcaaaatctttctctgatgttggagaaaatgggccagtgagatcatggatatagaagtacagtcaatgttcagctgtaccctcccacaatcccacttccttcctcaacacaattcaaacaaatagactcagactgtttcaggctccaggacaggaagtgcagtgtaggcaaaattgcaaaaattgagggcacaggggtggaggtgggggggttgaataacaagctgtgctaaataattacgtgtaaatatattttttcatttttaaaaattgatttcttttgcacattccatgacaatatatgtcacatttttaaaataaatgcaaagaagcatacatccaa

SEQ ID NO: 306 - DNA, 1058 bp, Homo Sapiens
ggccgctgtgacgtgaacgtgcgcaaccggaagctgcagtccccgctgcatctcgccgtgcaacaggcccacgtggggctggtgccgctactggtggacgctgggtgcagtgtcaacgccgaggacgaggagggggacacagccctgcacgtggcgctgcagcgtcatcagctgctgcccctggtggctgatggggccgggggggacccagggcccttgcagctgctgtccaggacatggggcgccggctgctggggctgccaggtgccaggagacgcctccctcgggcctgccccggcgcccgccctcaccggcgtctgtcctgccgcccagctacaggcctcgggcctccccggcagcgcggagctgacggtgggcgcggcggtcgcctgcttcctggcgctggagggcgccgacgtgagctacaccaaccaccgcggtcggagcccgctggacctggccgccgagggtcgcgtgctcaaggcccttcagggctgcgcccagcgcttccgggagcggcaggcgggcgggggcgcggccccgggccccaggcaaacgctcgggacccccaacaccgtgacgaacctgcacgtgggcgccgcgccggggcccgaggccgctgagtgcctggtgtgctccgagctggcgctgctggtgctgttctcgccgtgccagcaccgcaccgtgtgtgaggagtgcgcgcgcaggatgaagaagtgcatcaggtgccaggtggtcgtcagcaagaaactgcgcccagacggctctgaggtggcgagcgccgcccccgcccccggcccgccgcgccagctggtggaggagctgcagagccgctaccggcagatggaggaacgcatcacctgccccatctgcatcgacagccacatccgcctcgtgttccagtgcggccacggcgcatgcgccccctgcggctccgcgctcagcgcctgccccatctgccgccagcccatccgcgaccgcatccagatcttcgtgtgagccgcgccgtccgccgcgcccgagctgccttcgcgtgcccccgccctgtgttttataaa

SEQ ID NO: 307 - DNA, 476 bp, Homo Sapiens
aaacacttcgccactgcaggggtggagactggctctgttcggatgccggccgggggggagaggtgcaatcctctcctcgcggctggtggttgcgaccacccccactccccaaaggcaggctccggaggcggcgggacagagcgcctgcgaccccagtcggtgctccggggaggtcacctgacgaggaggtatgtgaggagcagcgctgtgaggaggaagtcttccccctggccatgaactacctggatcgctacctgtcttgcgtccccacccgaaaggcgcagttgcagctcctgggtgcggtctgcatgctgctggcctccaagctgcgcgagaccacgcccctgaccatcgaaaaactgtgcatctacaccgaccacgctgtctctccccgccagttgcggaagagagcccagttcatggtgatgctgtggtatctgctgcttccgtctttcagccctggctggagaaatcct

SEQ ID NO: 308 - DNA, 1117 bp, Homo Sapiens
ttttgtgcctgcctagctatccagacagagcagctaccctcagctctagctgatactacagacagtacaacagattcactggatgaaagaaagataaaaggggtcattgagctcaggaagagcttactgtctgccttgagaacttatgaaccatatggatccctggttcaacaaatacgaattctgctgctgggtccaattggagctgggaagtccagctttttcaactcagtgaggtctgttttccaagggcatgtaacgcatcaggctttggtgggcactaatacaactgggatatctgagaagtataggacatactctattagagacgggaaagatggcaaatacctgccgtttattctgtgtgactcactggggctgagtgagaaagaaggcggcctgtgcagggatgacatattctatatcttgaacggtaacattcgtgatagataccagtttaatcccatggaatcaatcaaattaaatcatcatgactacattgattccccatcgctgaaggacagaattcattgtgtggcatttgtatttgatgccagctctattcaatacttctcctctcagatgatagtaaagatcaaaagaattcgaagggagttggtaaacgctgctagaggaagtccaaagaaaacttggatttgctctttctgacatctcggtggttagcaattattcctctgagtgggagctggaccctgtaaaggatgttctaattctttctgctctgagacgaatgctatgggctgcagatgacttcttagaggatttgccttttgagcaaatagggaatctaagggaggaaattatcaactgtgcacaaggaaaaaaatagatatgtgaaaggttcacgtaaatttcctcacatcacagaagattaaaattcagaaaggagaaaacacagaccaaagagaagtatctaagaccaaagggatgtgttttattaatgtctaggatgaagaaatgcatagaacattgtagtacttgtaaataactagaaataacatgatttagtcataattgtgaaaaataataataatttttcttggatttatgttctgtatctgtgaaaaaataaatttcttataaaactcgggtctaa

SEQ ID NO: 309 - DNA, 339 bp, Homo Sapiens
tttccatcactcaaatagaaaggagatttgacatatcctcttctcttgctggtttaattgatggaagctttgaaattggaaatttgcttgtgattgtatttgtaagttactttggatctaaactacacagaccgaagttaattggaattggttgtctccttatgggaactggaagtattttgacatctttaccacatttcttcatgggataattttgattatcctcagtaaggcttcacaacttcacctgctgctgtacaggttttcccatcagcatttcactgaagctgctctttctaagttataggtattctaaagaaacccatattaatccatcag

SEQ ID NO: 310 - DNA, 449 bp, Homo Sapiens
caatgaagaggatgacccagttgtacaggagatcgatgtgtacttggccaagagtctggcggaaaagctgtatctatttcagtaccctgtgcgtccagcctcgatgacctacgatgacattccgcacctctcagccaagatcaagcccaagcagcagaaggtagagcttgagatggccatcgacaccctgaaccccaactattgccgcagcaaaggggagcagattgcgctgaacgtggacggggcctgcgccgacgagaccagcacgtattcctcgaagctgatggacaagcagaccttctgctcttcccagaccaccagtaacacatcccgttatgccgctgcactctacaggcagcatctatccaaaagaaatgaaaacatgtgtccacacaaaaccatacacagttgttcacagtagcatcttcatgatagccaaaaagtggaaa

SEQ ID NO: 311 - DNA, 474 bp, Homo Sapiens
ggagtgcgagcagatccgtctgaagtgtattcggtctagcgctctcgcccaggctggaatgcagtggcgtgatcacggctcagtgcatcgtcagcctcctgggctcaagtgatcttcctgcctcggcctcccaagtgctggaattacaggcgtgagccaccgcccccagcctggcctggcatttctttgagttcaggaagtgtgacaaggatttggacacccagaaataagcgtgtcgagaagagcacaagcagaggatctgggacgatgccggagtgtgaaggagtttgagaagctgaaccgcattggagagggtacctacggcattgtgtatcgggcccgggacacccagacagatgagattgtcgcactgaagaaggtgcggatggacaaggagaaggatggcatccccatcagcagcttgcgggagatcacgctgctgctccgcctgcgtcatccgaacatcgtggagct

SEQ ID NO: 312 - DNA, 536 bp, Homo Sapiens
ggtgtttaagggacagtggagatcatgccatttcagacctggtggaagcaaccactaatataaacacctcccatgtataggaaggctggagtgggaatccttaaccccgccccctgctcagggcaccaatgcctctgctctggaaaaagacattggtccagagcagtttccaatcaatgaacactatttcggattggtcaattttggaaacacatgctactgtaactccgtgcttcaggcattgtacttctgccgtccattccgggagaatgtgttggcatacaaggcccagcaaaagaagaaggaaaacttgctgacgtgcctggcggaccttttccacagcattgccacacagaagaagaaggttggcgtcatcccaccaaagaagttcatttcaaggctgagaaaagagaatgatctctttgataactacatgcagcaggatgctcatgaatttttaaattatttgctaaacactattgcggacatccttcaggaggagaagaaacaggaaaaacaaaatggaaaattaaaaa

SEQ ID NO: 313 - DNA, 596 bp, Homo Sapiens
aaccgcatctgcagcgagcatctgagaagccaagactgagccggcggccgcggcgcagcgaacgagcagtgaccgtgctcctacccagctctgctccacagcgcccacctgtctccgcccctcggcccctcgcccggctttgcctaaccgccacgatgatgttctcgggcttcaacgcagactacgaggcgtcatcctcccgctgcagcagcgcgtccccggccggggatagcctctcttactaccactcacccgcagactccttctccagcatgggctcgcctgtcaacgcgcaggtaaggctgccgtggccggagcggtgccggctcgggggctcgggacttgctctgagcgcacgcacgcttgccatagtaagaattggttcccccttcgggaggcaggttcgttctgagcaacctctggtctgcactccaggacggatctctgacattagctggagcagacgtgtcccaagcacaaactcgctaactagagcctggcttctccggggaggtggcagaaagcggcaatcccccctcccccggcagcctggagcacggaggagggatgagggaggagggtgcagcgggcgggtg

SEQ ID NO: 314 - DNA, 675 bp, Homo Sapiens
ttgtataaaaaaaatctaaaattggagtcctccacacatgcttgtaaaataaaggatcaaggatagaccttgacaaggtccaaaccataatggagtccatggggtcaaagttatctcctggagctcagcagttgatggatatggttaggtgtcagcagcggaattgtattcccattggagagcagcttcagtcggtgttgggcaattctggatacaagcatatgattggactacaatcctcatctaccttaggaaccttaaacaagtcgtcctccacaccttttccttttagaactggattgacatctgggaacgtgactgaaaacttacaaacttacattgataaaagtacacaactgcctggtggagagaattctaccaagcttgatgagtgtaaagttatgcctcaaaaccattcctttcttgaaaatgatcttaaaaatgcaatggcctctttcttaccaaagaaagtaagtgacaactcaaatatacccaactccgagttgctgccttttctccagaatttatgtagtcaagttaatcatctccatgtgggaaataagaccgagtgtcaggaaaacatcaccaagcatggtgaacgcattcttggtgttggaatggaagagcaatctatttgctcctacttggaaaagattctttctaaaaatatggaac

SEQ ID NO: 315 - DNA, 917 bp, Homo Sapiens
cagagcagctaccctcagctctagctgatactacagacagtacaacagattcactggatgaaagaaagataaaaggggtcattgagctcaggaagagcttactgtctgccttgagaacttatgaaccatatggatccctggttcaacaaatacgaattctgctgctgggtccaattggagctgggaagtccagctttttcaactcagtgaggtctgttttccaagggcatgtaacgcatcaggctttggtgggcactaatacaactgggatatctgagaagtataggacatactctattagagacgggaaagatggcaaatacctgccgtttattctgtgtgactcactggggctgagtgagaaagaaggcggcctgtgcagggatgacatattctatatcttgaacggtaacattcgtgatagataccagtttaatcccatggaatcaatcaaattaaatcatcatgactacattgattccccatcgctgaaggacagaattcattgtgtggcatttgtatttgatgccagctctattcaatacttctcctctcagatgatagtaaagatcaaaagaattcgaagggagttggtaaacgctgggaatctaagggaggaaattatcaactgtgcacaaggaaaaaaatagatatgtgaaaggttcacgtaaatttcctcacatcacagaagattaaaattcagaaaggagaaaacacagaccaaagagaagtatctaagaccaaagggatgtgttttattaatgtctaggatgaagaaatgcatagaacattgtagtacttgtaaataactagaaataacatgatttagtcataattgtgaaaaataataataatttttcttggatttatgttctgtatctgtgaaaaaataaatttcttataaaactcgggtctaa

SEQ ID NO: 316 - DNA, 2041 bp, Homo Sapiens
ggctcctttctccaatctcaatttatgacatctggaaattagctggctttcccaactcctgtcttttggattcagtgatgggaaagtaattggcaaagcctggggctaccctataagggcagggctcagatacaatccgagagcaggactaaagcatgagggcggccaaggcggaagggagtagggaaggaagcgccgcgcgtttccaagatacgcaggcgggctcggcgagagagcacgaagtatctgccccacgcaggaacggcaattttcccttgctcgctcctagaaaagccagccaggagctgtgggaggaaacgccctcagtaaagatgaccgcggtcactgttatctaaacgcaagtgaagccgagtcacaggacccggatgttgtcagttcgacggtaaacgaccctgccagcttccaagagggcggcttcactgtgcgaataggtgagaagccaagaaggaggcgcgctggagttacttccgcccggttctccttcccgcagtctgcagccggagtaagatggcggcgctgagggctttgtgcggcttccggggcgtcgcggcccaggtgctgcggcctggggctggagtccgattgccgattcagcccagcagaggtgttcggcagtggcagccagatgtggaatgggcacagcagtttgggggagctgttatgtacccaagcaaagaaacagcccactggaagcctccaccttggaatgatgtggaccctccaaaggacacaattgtgaagaacattaccctgaactttgggccccaacacccagcagcgcatggtgtcctgcgactagtgatggaattgagtggggagatggtgcggaagtgtgatcctcacatcgggctcctgcaccgaggcactgagaagctcattgaatacaagacctatcttcaggcccttccatactttgaccggctagactatgtgtccatgatgtgtaacgaacaggcctattctctagctgtggagaagttgctaaacatccggcctcctcctcgggcacagtggatccgagtgctgtttggagaaatcacacgtttgttgaaccacatcatggctgtgaccacacatgccctggaccttggggccatgacccctttcttctggctgtttgaagaaagggagaagatgtttgagttctacgagcgagtgtctggagcccgaatgcatgctgcttatatccggccaggaggagtgcaccaggacctaccccttgggcttatggatgacatttatcagttttctaagaacttctctcttcggcttgatgagttggaggagttgctgaccaacaataggatctggcgaaatcggacaattgacattggggttgtaacagcagaagaagcacttaactatggttttagtggagtgatgcttcggggctcaggcatccagtgggacctgcggaagacccagccctatgatgtttacgaccaggttgagtttgatgttcctgttggttctcgaggggactgctatgataggtacctgtgccgggtggaggagatgcgccagtccctgagaattatcgcacagtgtctaaacaagatgcctcctggggagatcaaggttgatgatgccaaagtgtctccacctaagcgagcagagatgaagacttccatggagtcactgattcatcactttaagttgtatactgagggctaccaagttcctccaggagccacatatactgccattgaggctcccaagggagagtttggggtgtacctggtgtctgatggcagcagccgcccttatcgatgcaagatcaaggctcctggttttgcccatctggctggtttggacaagatgtctaagggacacatgttggcagatgtcgttgccatcataggtacgaggcctattgtgtagtagaggtacccaagatattgtatttggagaagtagatcggtgagcaggggagcagcgtttgatcccccctgcctatcagcttcttctgtggagcctgttcctcactggaaattggcctctgtgtgtgtgtgtgtgtgtg

SEQ ID NO: 317 - DNA, 890 bp, Homo Sapiens
cacagatctcttaagaactttctgtctccaaaccgtggctgctcgataaatcagacagaacagttaatcctcaatttaagcctgatctaacccctagaaacaggaattaaggataacctagacgacataaagaggataattaaagccagagagcacagaaataggcttctagcagacatcagagactataggccctatgcagacttggtttcagaaattcgtattcttttggtgggtccagttgggtctggaaagtccagttttttcaattcagtcaagtctatttttcatggccatgtgactggccaagccgtagtggggtctgatatcaccagcataaccgagcggtataggatatattctgttaaagatggaaaaaatggaaaatctctgccatttatgttgtgtgacactatggggctagatggggcagaaggagcaggactgtgcatggatgacattccccacatcttaaaaggttgtatgccagacagatatcagtttaattcccgtaaaccaattacacctgagcattctacttttatcacctctccatctctgaaggacaggattcactgtgtggcttatgtcttagacatcaactctattgacaatctctactctaaaatgttggcaaaagtgaagcaagttcacaaagaagtattaaactgtggtatagcatatgtggccttgcttactaaagtggatgattgcagtgaggttcttcaagacaactttttaaacatgagtagatctatgacttctcaaagccgggtcatgaatgtccataaaatgctaggcattcctatttccaatattttgatggttggaaattatgcttcagatttggaactggaccccatgaaggatattctcatcctctctgcact

SEQ ID NO: 318 - DNA, 423 bp, Homo Sapiens
gattctcctcggggctccttcctctccgctcccttcccaaccaagaaggacacgcagaactttgctggagagatcaatgtttctagaacaccctgaaacaaaagtcctgatatgtgcaaataatacacacccacaaaagaaaataacctctttgcgctgacaccctgcctctccgaagaggacgttttctccctacttggaatttccatcagcacctgggttggtaccaaactcaggacgtggtggacacgctctctgactctgtatttcaggaagctgccaatcaatagagatttaaagcttctgacttccgcatatccgaataccaggtaggaaacatctgctttggagtaagagaaggccccagtacctgctttttctccggaaccgtgagagggagccatggggaggagaccagaattt

SEQ ID NO: 319 - DNA, 668 bp, Homo Sapiens
agaaaatgacatttgtaataggaattttaagattttattacttcttctttcatctcctcaaaggaatgaagaaatgttggtgggcagatcttcctttcccatgcagtattttccaattaataatacttctttacctcaagaatattttctctttcagaagatgcagtggcatgtgtataatccagtgctgcagcttccttactatgaaatgacagctccacttcctaatagtgcatccgtgtcttcctcactgaatcatgttccagatcttgaggctggacccagctcatataaatggactcaccaacaaccaagtgactctgacctttatcagatgacagctccacttcctaatagtgcatccgtgtcttcctcactgaatcatgttccagatcttgaggctggacccagctcatataaatggactcaccaacaaccaagtgactctgacctttatcagatgaataaacgaaagagacaaaagcaaacaagtgatagtgatagtagcacagacaacaacagaggcaacgaatgtagccaaaagttccgaaagtctaagaagaagaaaagatactagtattacctacaaatgaaacttacctacactgatcttagttctcttatgaaaaaaataagatgttatcccatcaaataaacaatgtcatggc

SEQ ID NO: 320 - DNA, 1140 bp, Homo Sapiens
ctgcagatacagtaggaagatggcagtctatgaccaggaagaggttcctcaccataaccctaccatgctggcaccttgaccttagacttccaaactccagaactgtgagaaatgtctgttgtggatcagctacccagtttatgatcggccctttcttcaaataagagcagttggaacaacaaaagctgttcagttgtacccttggaatccacggaaatcctgggtagggaagctccagtaccaccaactggaaagactgggaatgcctagtagctggtactggccattgtcgtaggctttgtccactttgacaaactgaagacggggactcgactcaccttcgccagccacaggaggacctccagacgaggaccggactcgccgcctttctttcccgtcagaaagggatcccttgcggacaagaccgaatggcccctaaggcttctctgcaggtccaaccgaaacaggcctgaagttccaggatgggcgagaggatcctctttgagcgaaaccagccttctgcctggctggccctggtcaacacactcggaagaggccgatttggaggacagaacggaagaaaagacctaaagaactgacacatttgtgcctagcatagtgatgctgttgtctgcagaagggtcacagccttcagggactctcctgccagtgctgtattttgcctgcacccctctggcttggcttctgcactgagaccctcctaacaaatgatcctcatccaatcacttaaaggcctgaatagaaccaaaagtctgacctgcccatgagtaagagagagctccttctgcctgattgcttcagctgagatatcagccttttcctgcctttggaattgaactgcaacactggctcttcctgggcctcaagcctgccagcttttgaactgtaatcacaccatcatctctcctggttctcaggcctttggactcaaatcagaaacacaccatgggctctcctgtgtctcaagcttgccaactgtgatcttgagacttctcagcctccataatcacatgagtcaattgttggttctgtttctctggagaaccctaatccatcactttacatatttcttccattacacatattgtttcccagcatattaaataatttactgattat

SEQ ID NO: 321 - DNA, 569 bp, Homo Sapiens
gctctgcgtctccttaccctgggcctagcttcccccaggaaatgggaagctagaagtcgctgagtctgggggtgttgggagaagggggcggtgatttccacaggggtcacctccttcttaacctcacaggcgtccgacctgtggaaatctaacaagcataggggaaagcaaaggcagcatcttagccctcccggagccggtgccggcccgcgagccccagcgtctctgcagaccagtcccctccagggtccggcggggcccgcgcggtgggaggagtcgggcactggccggcgactaacgggtccgactgctgaccaagctaggagagacccggaccacggagacagagaccccggcatcgcgacccccgaggacctcctctcctcgccctgtggcacccactagtcctgggcactcagccgcggagagcccccgaccccgcgcgcccagccccgggggagcccacctcctccccgcggcccgcccgggccatgctcccccggggcagcgggtgagccccagccgggaccgggatcggagcccgcgcggagcatggatccgggctgggg

SEQ ID NO: 322 - DNA, 551 bp, Homo Sapiens
gtgtcgggacctcttggtgggagcagccttccgaggtggccgggctggacgagatcagaggctccccgtcgatagggtcggagacccccgtccctcactgcggcagccgcggcgcccctcctgcgcaccgcgccgagtctcacgcgtatcttctcccccttccaggcgctctccacctgccccgctgcctgccactgccccctggaggcgcccaagtgcgcgccgggagtcgggctggtccgggacggctgcggctgctgtaaggtctgcgccaagcagctcaacgaggactgcagcaaaacgcagccctgcgaccacaccaaggggctggaatgcaacttcggcgccagctccaccgctctgaaggggatctgcagagctcagtcagagggcagaccctgtgaatataactccagaatctaccaaaacggggaaagtttccagcccaactgtaaacatcagtgcacatgtattgatggcgccgtgggctgcattcctctgtgtccccaagaactatctctccccaacttgggctgtcccaaccctcggct

SEQ ID NO: 323 - DNA, 705 bp, Homo Sapiens
ggggtagggcacccctttgacacccctggctggtctcaggccctgcctctttccccactaggtgggttcagtagaagaattccaaggccaagaacgaagcgtcatcctcatctccaccgtgcgaagcagccagagctttgtgcagctggatctggactttaatctgggtttccttaagaaccccaagaggttcaatgtagctgtgacccgggccaaggccctgctcatcatcgtggggaacccccttctcctgggccatgaccctgactggaaagtattcctggagttctgtaaagaaaacggagggtataccgggtgtcccttccctgccaaactggacctgcaacagggacagaatttactgcaaggtctgagcaagctcagcccctctacctcagggccccacagccatgactacctcccccaggagcgggagggtgaagggggcctgtctctgcaagtggagccagagtggaggaatgagctctgaagacacagcacccagccttctcgcaccagccaagccttaactgcctgcctgaccctgaaccagaacccagctgaactgcccctccaagggacaggaaggctgggggagggagtttacaacccaagccattccaccccctcccctgctggggagaatgacacatcaagctgctaacaattgggggaaggggaaggaagaaaactctgaaaacaaaa

SEQ ID NO: 324 - DNA, 3300 bp, Homo Sapiens
tgtgtggaaggaggaaggcagggagaggtagaaggggtggaggagtcaggaggaataggccgcagcagccctggaaatgatcaggaaggcaggcaaccaagggctgtgaacccgcctggggatgaggcctggtcttgtggaactgaacttagctcgacggggctgaccgctctggcccagggtggtatgtaattttcgctcggcctgggacggggcccaggccgggcccagcctggtggagcgtccaggtctgggtgcgaagccaggcccctgggcggaggtgaggggtggtctgaggagtgatgtggagttaaggcgccatcctcaccggtgactggtgcggcacctagcatgtttgacaggcggggactgcgaggcacgctgctcgggtgttggggacaacattgaccaacgctttattttccaggtggcagtgctccttttggacttttctctaggtttggcgctaaactcttcttgtgagctcactccaccccttcttcctccctttaacttatccattcacttaaaacattacctggtcatctggtaagcccgggacagtaagccgagtggctgttggagtcggtattgttggtaatggtggaggaagagaggccttcccgctgaggctggggtggggcggatcggtgttgcttgcctgcagagagggtggggagtgaatgtgcacccttgggtgggcctgcagccatccagctgaaagttacaaaaatgcttcatggaccgtggtttgttactatagtgttcctcatggcgagcagatggaaccgggagacatggagtccctggccagtgtgagtcctagcattgcaggaggggagaccctggaggagagagcccgcctcaattgatgcctgcagattgaatttccagaggcttaggaggaggaagttctccaatgttctgtttccaggccttgctcaggaagccctgtattcaggaggctaccatttaaagtttgcagatgagcttatggggggcaatcttaaaaagtccacagcagatgcatccggctcgaggggccatcagctttgaataaatgcttgttccagagcccatgaatgccagcaggcacccctcctttcctggggtaaaggttttcagatgctgcatcttctaaattgagcctccggtcatactagttttgtgcttggaaccttgcttcaagaagatccctaagctgtagaacattttaacgttgatgccacaacgcagattgatgccttgtagatggagcttgcagatggagccccgtgacctctcacctacccacctgtttgcctgccttcttgtgcgtttctcggagaagttcttagcctgatgaaataacttggggcgttgaagagctgtttaattttaaatgccttagactggggatatattagaggaagcagattgtcaaattaagggtgtcattgtgttgtgctaaacgctgggagggtacaagttggtcattcctaaatctgtgtgtgagaaatggcaggtctagtttgggcattgtgattgcattgcagattactaggagaagggaatggtgggtacaccggtagtgctcttttgttcttgcttcgtttttttaaacttgaactttacttcgttagatttcataatactttcttggcattctagtaagaggaccctgaggtgggagttgtgggggacggggagaaggggacagcttggcaccggtcccgtgggcgttgcagtgtgggggatgggggtatgcagcttggcactggtactgggagggatgagggtgaagaaggggagagggttggttagagatacagtgtgggtggtgggggtggtaggaaatgcaggttgaagggaattctctggggctttggggaatttagtgcgtgggtgagccaagaaaatactaattaataatagtaagttgttagtgttggttaagttgttgcttggaagtgagaagttgcttagaaactttccaaagtgcttagaactttaagtgcaaacagacaaactaacaaacaaaaattgttttgctttgctacaaggtggggaagactgaagaagtgttaactgaaaacaggtgacacagagtcaccagttttccgagaaccaaagggaggggtgtgtgatgccatctcacaggcaggggaaatgtctttaccagcttcctcctggtggccaagacagcctgtttcagagggttgttttgtttggggtgtgggtgttatcaagtgaattagtcacttgaaagatgggcgtcagacttgcatacgcagcagatcagcatccttcgctgccccttagcaacttaggtggttgatttgaaactgtgaaggtgtgattttttcaggagctggaagtcttagaaaagccttgtaaatgcctatattgtgggcttttaacgtatttaagggaccacttaagacgagattagatgggctcttctggatttgttcctcatttgtcacaggtgtcttgtgattgaaaatcatgagcgaagtgaaattgcattgaatttcaagggaatttagtatgtaaatcgtgccttagaaacacatctgttgtcttttctgtgtttggtcgatattaataatggcaaaatttttgcctatctagtatcttcaaattgtagtctttgtaacaaccaaataaccttttgtggtcactgtaaaattaatatttggtagacagaatccatgtacctttgctaaggttagaatgaataatttattgtatttttaatttgaatgtttgtgctttttaaatgagccaagactagaggggaaactatcacctaaaatcagtttggaaaacaagacctaaaaagggaaggggatggggattgtggggagagagtgggcgaggtgcctttactacatgtgtgatctgaaaaccctgcttggttctgagctgcgtctattgaattggtaaagtaataccaatggctttttatcatttccttcttccctttaagtttcacttgaaattttaaaaatcatggttatttttatcgttgggatctttctgtcttctgggttccattttttaaatgtttaaaaatatgttgacatggtagttcagttcttaaccaatgacttggggatgatgcaaacaattactgtcgttgggatttagagtgtattagtcacgcatgtatggggaagtagtctcgggtatgctgttgtgaaattgaaactgtaaaagtagatggttgaaagtactggtatgttgctctgtatggtaagaactaattctgttacgtcatgtacataattactaatcacttttcttcccctttacagc

SEQ ID NO: 325 - DNA, 416 bp, Homo Sapiens
ggctggggatgcccagtgtagactgtagcgctagagaagcaatttctgacccctctttctttctctggtcactcaatttcaggacaggagttgctccttcccaaagagttttggggtgactcctgcacctgcgccggctcctgcaaatgcaaagagtgcaaatgcacctcctgcaagaaaagctgctgctcctgctgccctgtgggctgtgccaagtgtgcccagggctgcatctgcaaaggggcgtcggacaagtgcagctgctgcgcctgatgctgggacagccccgctcccagatgtaaagaacgcgacttccacaaacctggattttttatgtacaaccctgaccgtgaccgtttgctatattcctttttctatgaaataatgtgaatgataataaaacagctttgacttga

SEQ ID NO: 326 - DNA, 788 bp, Homo Sapiens
agcggggctgtctatcccggctgaggacccgcggccagtgcgggtggctggctttgccattagcgggggcctttcctgaggacggcgtacggagtgtgggttactcctggatggagcacctctgatagcaatccacaaagccaggtattacaagaggaaagatggcttagccctggggcctggaccatttgtgactgctttagagtatgccacagataccaaagccacagtcgtggggaaaccagagaagacgttctttttggaagcattgcggggcactggctgtgaacctgaggaggctgtcatgataggagatgattgcagggatgatgttggtggggctcaagatgtcggcatgctgggcatcttagtaaagactgggaaatatcgagcatcagatgaagaaaaaattaatccacctccttacttaacttgtgagagtttccctcatgctgtggaccacattctgcagcacctattgtgaagcagtgtgtgcatctgaagcaacttgaaatgcagcttcttattgtctggaatgaatcccttaccaactcagtgccagcatcggtagacaccagtcagtgctgatcgctttttaaccctcttttgttgtgcattaattagaaagaaaggtattgaattgcggctagccagtaagccttgctaatctcttttattttgtaactgaagatgagacccaaagaaagggaaagctgagattttgtgccattccttttaaaatattcatcaggttaggtggggctgtgggggaaaagctactacaggga

SEQ ID NO: 327 - DNA, 641 bp, Homo Sapiens
ctcgagccagctcaagcccgcagctcgcagggagatccagctccgtcctgcctgcagcagcacaaccctgcacacccaccatggatgtcttcaagaagggcttctccatcgccaaggagggcgtggtgggtgcggtggaaaagaccaagcagggggtgacggaagcagctgagaagaccaaggagggggtcatgtatgtgggagccaagaccaaggagaatgttgtacagagcgtgacctcagtggccgagaagaccaaggagcaggccaacgccgtgagcgaggctgtggtgagcagcgtcaacactgtggccaccaagaccgtggaggaggcggagaacatcgcggtcacctccggggtggtgcgcaaggaggacttgaggccatctgccccccaacaggagggtgaggcatccaaagagaaagaggaagtggcagaggaggtaggagctgggctcctggggtgcaccatggggggttccttggtagggaccccatcccccacagacgcactgcttccctcctgggctcccagggcccagaggggcctcctgaccttccacagcccctacagggactgtgtacagggctaaccctgaacctgagtgggaggtccccccacggatgacccctcaggcatg

SEQ ID NO: 328 - DNA, 1753 bp, Homo Sapiens
aattgctggagtcgggaacccgagaggtgagcaagagcaagcacttagctgagtgagtcaggcgggcctgcgtgaaaggatatacactgcctctaggactgggacagatagccactgagtacctgcttcaaatcaccctgcacgttttctctttggaaagataagcactggagaaccatctcgttaccttcagcagaaatggaaacaaatcaagacattaagaatgccgcagtggacagcagttatgcaaggttcagcagaggaagttttcaagatggtgtgcctcactagccagaaatcagaaaagatcgaagctagccttttcatctcagctgctccttaaatcagtgcaacccctccaaattaatgtgaattgaaacttgcattgcttttcaacttaattgaatacttactatatgtgaaccactgcacaaaataggggaagaagatgtgggagacaaagatgtggagcctgtcttcaataaatttacagttagtttcagggtacattgtttttcttctgctgttaattaggtgtatccccaagacaataaatacatgaatggaaaagtatattctgtgttttaagtctctttaataaaaaacaaaacaaaatccaaaaaaactcctaacatggcaactcaggacattttaatccttttttttgttgttgggcttctgataggatccattttattgattccataaatatttagtagactttagacatattaatacattgtagtttgagttaatttgcattaaattctgtttttttccccttaggtatagattgtctgttggaaaaatatattgcttgtggatttcttggggagtgggaaggtgaattatacctgttgtctctacagtccactaccttccacaccctagggcagtggtccccaaccttcttggcaccagggatcagtttcctggaagacaatttttctgtggatggtgtggggatggttttgggatggaactgttccacctcagatcatcaggcattagttaggctctcataacgagtgcgcagcctagatccctcacatgcacagttcacagtagggtttgcgctgctatgagaatctaaggctgccactgatctgacaggaggcagaactcaggtggcaatgcttactggcccactgctcacctcttgctgtgcggcctggttcctaataggccatggacccccacagacgggtactagtctgcagcctgtggaccccagccctaggggcctgccattctgagtgagttattagcatgaagaagaggaagatctggatcaaacgtgggtgatggtactcagagacccaagataggatagggatggaacaaaatccatctgggcaacggctctatgaaaatttggctaagtaattatttcagtattcattgtattcattgtccttcgtgttccataagttaaatgactgtctaatttttccaaaaatttatttctgacttgagaataagtgtgtcatgattttcccagtgtaaagacactgatataactgtagataccagacattttatgtagtgtctatgacacattttagtatgtatgagccaacaatagacatgtctttgtcttgaggagtgtccatctgaattgaaaatgtgtcagcttttttttaacatcatcaacagacttcttaattaagctgccaatacatactgccaatagcactgtgtgctgtctgagaaatgcattgtgtaagtgctatttccatcttattaaataaac

SEQ ID NO: 329 - DNA, 682 bp, Homo Sapiens
ttgattatgaaaaatgaatacactaaaattgtagtcttttatgagattaataattgtgaattagcctaaagtgttttctctaaattattggttttagaatgctaacagaccctcgacctctcaagcagctagagtagaaattcaagaaagaaatggtaaacggcatcaagatgatgagcctgtgaattctcagtatttccaaactacatctacaaatttaagtctgagcaataaaataagaattcttcaaggcccacacgctaatccagttgctgtacctcaaccaggagcttctgtacaaacaaagggaattaaaccgggcatgccaagcatcttcaaccgtcgagcaaatataaatgctaatctgcaagggaaagccagaaaaactataagtgataggtgggagagtcagctgtggagagagaaaaagtttggcttaatagatcacctacactacagccgtgtttatcctgaaagtattccacggaaatttatgtttgaacacagaaagtttcttagtgaccagtataattctcagcctgcgaaatatgtaccaccagaaggaaggcccccaaaacttgatgattttaagagcgcccgaagccttggacattttgaagtaaccatactaggtctgaaccatgagatagcaatcgatgttgctttcctacccatgtattgt

SEQ ID NO: 330 - DNA, 3441 bp, Homo Sapiens
gcaaaagttgtggcaagtccagccggagttagcgacagggagggatgcgcgcctgggtgtagttgtgggggaggaagtggctagctcagggcttcaggggacagacagggagagatgactgagttagatgagacgagggggcgggctgggggtgcgagaaggaagcttggcaaggagactaggtctagggggaccacagtggggcaggctgcatggaaaatatccgcagggtcccccaggcagaacagccacgctccaggccaggctgtccctactgcctggtggagggggaacttgacctctgggagggcgccgctcttgcatagctgagcgagcccgggtgcgctggtctgtgtggaaggaggaaggcagggagaggtagaaggggtggaggagtcaggaggaataggccgcagcagccctggaaatgatcaggaaggcaggcagtgggtgcagggctgcaggagggccgggagggctaatcttcaacttgtccatgccagcagcccctttttttccagaccaagggctgtgaacccgcctggggatgaggcctggtcttgtggaactgaacttagctcgacggggctgaccgctctggcccagggtggtggcagtgctccttttggacttttctctaggtttggcgctaaactcttcttgtgagctcactccaccccttcttcctccctttaacttatccattcacttaaaacattacctggtcatctggtaagcccgggacagtaagccgagtggctgttggagtcggtattgttggtaatggtggaggaagagaggccttcccgctgaggctggggtggggcggatcggtgttgcttgcctgcagagagggtggggagtgaatgtgcacccttgggtgggcctgcagccatccagctgaaagttacaaaaatgcttcatggaccgtggtttgttactatagtgttcctcatggcgagcagatggaaccgggagacatggagtccctggccagtgtgagtcctagcattgcaggaggggagaccctggaggagagagcccgcctcaattgatgcctgcagattgaatttccagaggcttaggaggaggaagttctccaatgttctgtttccaggccttgctcaggaagccctgtattcaggaggctaccatttaaagtttgcagatgagcttatggggggcaatcttaaaaagtccacagcagatgcatccggctcgaggggccatcagctttgaataaatgcttgttccagagcccatgaatgccagcaggcacccctcctttcctggggtaaaggttttcagatgctgcatcttctaaattgagcctccggtcatactagttttgtgcttggaaccttgcttcaagaagatccctaagctgtagaacattttaacgttgatgccacaacgcagattgatgccttgtagatggagcttgcagatggagccccgtgacctctcacctacccacctgtttgcctgccttcttgtgcgtttctcggagaagttcttagcctgatgaaataacttggggcgttgaagagctgtttaattttaaatgccttagactggggatatattagaggaagcagattgtcaaattaagggtgtcattgtgttgtgctaaacgctgggagggtacaagttggtcattcctaaatctgtgtgtgagaaatggcaggtctagtttgggcattgtgattgcattgcagattactaggagaagggaatggtgggtacaccggtagtgctcttttgttcttgcttcgtttttttaaacttgaactttacttcgttagatttcataatactttcttggcattctagtaagaggaccctgaggtgggagttgtgggggacggggagaaggggacagcttggcaccggtcccgtgggcgttgcagtgtgggggatgggggtatgcagcttggcactggtactgggagggatgagggtgaagaaggggagagggttggttagagatacagtgtgggtggtgggggtggtaggaaatgcaggttgaagggaattctctggggctttggggaatttagtgcgtgggtgagccaagaaaatactaattaataatagtaagttgttagtgttggttaagttgttgcttggaagtgagaagttgcttagaaactttccaaagtgcttagaactttaagtgcaaacagacaaactaacaaacaaaaattgttttgctttgctacaaggtggggaagactgaagaagtgttaactgaaaacaggtgacacagagtcaccagttttccgagaaccaaagggaggggtgtgtgatgccatctcacaggcaggggaaatgtctttaccagcttcctcctggtggccaagacagcctgtttcagagggttgttttgtttggggtgtgggtgttatcaagtgaattagtcacttgaaagatgggcgtcagacttgcatacgcagcagatcagcatccttcgctgccccttagcaacttaggtggttgatttgaaactgtgaaggtgtgattttttcaggagctggaagtcttagaaaagccttgtaaatgcctatattgtgggcttttaacgtatttaagggaccacttaagacgagattagatgggctcttctggatttgttcctcatttgtcacaggtgtcttgtgattgaaaatcatgagcgaagtgaaattgcattgaatttcaagggaatttagtatgtaaatcgtgccttagaaacacatctgttgtcttttctgtgtttggtcgatattaataatggcaaaatttttgcctatctagtatcttcaaattgtagtctttgtaacaaccaaataaccttttgtggtcactgtaaaattaatatttggtagacagaatccatgtacctttgctaaggttagaatgaataatttattgtatttttaatttgaatgtttgtgctttttaaatgagccaagactagaggggaaactatcacctaaaatcagtttggaaaacaagacctaaaaagggaaggggatggggattgtggggagagagtgggcgaggtgcctttactacatgtgtgatctgaaaaccctgcttggttctgagctgcgtctattgaattggtaaagtaataccaatggctttttatcatttccttcttccctttaagtttcacttgaaattttaaaaatcatggttatttttatcgttgggatctttctgtcttctgggttccattttttaaatgtttaaaaatatgttgacatggtagttcagttcttaaccaatgacttggggatgatgcaaacaattactgtcgttgggatttagagtgtattagtcacgcatgtatggggaagtagtctcgggtatgctgttgtgaaattgaaactgtaaaagtagatggttgaaagtactggtatgttgctctgtatggtaagaactaattctgttacg

SEQ ID NO: 331 - DNA, 567 bp, Homo Sapiens
aggacccagggtacacagggtgggtggctattctccagaaatgtcagtttctgggcagggcttaggtgtctgcagtccctagtcccacccctggccttgcattccagctcagcgggtggaaggtataaatttcagctgctctcagccctgctgtgtttttccaaagccttccaacagcaacatgaagttggcagccttcctcctcctgtgatcctcatcatcttcagcctagaggtacaagagcttcaggctgcaggagaccggcttttgggtacctgcgtcgagctctgcacaggtgactgggactgcaaccccggagaccactgtgtcagcaatgggtgtggccatgagtgtgttgcagggtaaggacagatgaagagttatcttaaggatcatctttccctaagatcgtcatcccttcctggagttcctatcttccaagatgtgactgtctggagttccttgactaggaagatggatgaaaacagcaagcctgtggatggagactacaggggatatgggaggcagggaagaggggttgtttcttttaataaatcatcattgtta

SEQ ID NO: 332 - DNA, 794 bp, Homo Sapiens
tggaccctgggtctagccagtgtccctacctcaggcctgctctctcttgtcccccacattctgtcctgtccccttcccatccatccacttcttccagacacagcaggaagaggccctctgaaggggccgccggcccccagacaccatccttacccccccaccgaccccacagtttgtccagctgttctgttgtgtttgtcctgaccgcccccaacacctcgagggaggtctgggctgacagctccatttcctccccaggagccaagaccaaggagaatgttgtacagagcgtgacctcagtggccgagaagaccaaggagcaggccaacgccgtgagcgaggctgtggtgagcagcgtcaacactgtggccaccaagaccgtggaggaggcggagaacatcgcggtcacctccggggtggtgcgcaaggaggacttgaggccatctgccccccaacaggagggtgaggcatccaaagagaaagaggaagtggcagaggaggcccagagtgggggagactagagggctacaggccagcgtggatgacctgaagagcgctcctctgccttggacaccatcccctcctagcacaaggagtgcccgccttgagtgacatgcggctgcccacgctcctgccctcgtctccctggccacccttggcctgtccacctgtgctgctgcaccaacctcactgccctccctcggccccacccaccctctggtccttctgaccccacttatgctgctgtgaattttttttttaaatgattccaaataaaacttgagcccactcct

SEQ ID NO: 333 - DNA, 6758 bp, Homo Sapiens
aagaatcaagaacaaagccctgacctgttcaggacagcaaagacaaggctgggtttccagcagaagccagagtgcggccggtgctgaggagtctcttctgagcaccacgtcccttggcaatgccgccgaaaaagagagctcctggccgagaatcacatgaaaatggacggggacgtttataccaacacaacgccctctcagccccatcgtgcacaaacgcagcgcagagccccagtcttgagagtggagcagccaagccaggggggactctgggcccctctgccacccacagccccagtggccgaggcccagggcagcgcaaggttgcccatcagtggaggtgggaggtcattcccacctccacttgcctgcccggagcagaaagggatgcaggaggaagcaagacggcttacctggccatggctgaagaagagcagggctcccgagtacatgagctcccgggcctccgtgtgcttgctctgggacatgtacctgccacagagaggagaccgtgagccacgcccacgtgccctcgccaccgcgctcccccgctcatcttcaggtcagaagctaaaaacaaggcgcccaggaacaggtggcatcctaaaagcagccgctcccagggcccaggtgctgcgtggagggggtctatcctgggtgtcctgctgaccatgagggctgcatggggcgcctctggacactaagggcctatctgtgtccaaatacaccaggagccagaaagcagcctcaccctggagcagctcaccggtttcagtagctgggaccagaaaggccactgggcagggcaggtgcgcagggaaggagcaggggatgtgcatgtggccacctgagagctgagtggccacaggcaggagccaaaggatggggggctccaggctggggtcccacgggggacagtaacggctgtgacagcaccttcttcccccacggggccagtgtccccgccctctgcccctctgcgtgccacacccctccccccacgggagggaagggtctggggtgccccgttgcatcatgctcgccctgcatcacgtccccactcccagagcaccgctggcagggaaagctggagctcctcaggccgcacggggacagaggcacggggtggcgagaggtatggtggggaccagcgcgtgacagacgatgtggagagaagccgagatggccgcactgctgtaagcagcagagcccctgcctgcgagagcagcaggcgtggagggcaggaggcagcctctgcttggatgcgctgcacctcccagtccagtggtggggcccagaacatgttatttcattggctacacgtttttcttaatgatcgctgccttattatcaaaagatacataacgagttaatcagctctgtgcctgcgagccaaatgtccttggacaaagccttgtttaaaaataaatctagttaaagaaaaatactaagtaaacagcagtgcacaccggattcgggggctcacacctgtaatctcagccctttgggaggctgaggtgggaggatcgcttgagctcatgagtttgagactggcctgagcaacatagtgagaccctgtctctacaaaaaacacagaaattagctgggcatggtggtgtgcacctgtggtcccagctactcgggaggctgaggtgggaggactgcttgagtccgggtagtcaaggccgcagtaagccatgattgcaccactgcctagacggatgacagagcgaggcgccatccccccaaaacaaacaaacaaaaaccaattgcagtggaggtgataaagagccacagcaacgccactgaggaccagaatgaccttggtgttgccaggacgggaaggccagccgagaacgcaaagggttggatgctcagttaaccacagaaaagggctcctcttcagaaggcaccacagccagggaccccaaacacagacagccccgccacatccgggcatctcattagcctggcacacaggccctccccccacaggagaccgcttcgtgctgcacagaggcagggcaccaggagggaaaagcccgcacccaagagagaaagtgcccccgcacccccgtcagcctgcaggccgttggcaggcctccggttttgctgtgctccccgcacagtgaaggttctggagggagacccaccccaacaccacagcaggagcctcgacaggaccactgactctgtgaccggccgtcctagttccagtcctgcagggacatgactgactcagaggaggccgggagccgtctggcacagggcactctggaaaaacaagctcccagacacgcctggcctcacgatgccgccagtggggccacgggcagaaccgcatgcaccgaccctgagcaagcaccacaccagcttctgctttgccgatactacagcgttctggatgcttctatctgaggtaaagcaagaggtggcgacttagaaaccagaagaaaaaaaggactccctggaaggcagtgacccatattcctgcacgaggagcctgctctggggggcactgccgatggtcacggcccccggcctggtttggactgcgccttgcagccggctcccttcttccctgggcagctgggagccgggcaaggggaaaaaggacgggaggagaattctgggcacacagtggtccccggcctggctgggggcacccgtttccaggtccaggaatgccggtgacaggcaaaccgtctaaggcggctctgaacgtggacggcttctcctcctgtactggagaattctggaagctgcgaaggattttggtttccaggtgactaagccaggacaggtaccctctcaagcccgaggccggggagagtggggggcagctgggcatggccgggccttctcccggcccggctctgcatgctgcgcactattggccgtgccatgtggacacccagacgtgccttccagatagggaaatggcttctgcctgctgacaggcgctgagagccagtgagcgctggtgctctctgccggccaaaacatctgtatccacagagcaaagtgtctgggcaaacaatctagctgattttgctcttctcttacaaaaacattaaaaagcagaacacagaaacgcaagcattagaactagtggccgagactgtcggtgtcaaatgaagaaagaccgagctcatggggcgaatcccgcccttctctcttggcagacggaagctggcttgcgcgttcagctgtcagggacacgtgaaggatgaagaggaaatactcaagacacacacaggtgcctcgggacagggggccagaggagatttcacaaggacccctccgccgactgccgcgagctaaagcgcactcacgcccggacgcagggctggctggacgcgcctgtaaggagggctgaggcctgctctgctctgccaggagtcactccgagaagggacctgagccggcaggtacagctccttcacaagacgctcctcttaggccctgggctaggggtgcaccgcacacactagaccgttttccttttaaaaatctctttagatgactgaagagacaaaagaaggtcagaggccgcaataaaaaaaatcacgcaaacacactgcaggaggagccaagtggcaggaagagccagacccacgaccgtgtgggcagacagggggacagctgctgcaggtcacagcctcctgggctgtggtctcagccacaccaagtttctaaatgccaatgtacaaatactacagccaaggctgaggctcctcaagacctggatggtggctccgaagtgccccaataatccagttggcctgggagatgactccccgtcccagcagggagaagtctggagaaagcaggtgatgaccacaacccgcgccatccccggggcaaggtcggccgcccacaacccgcgccatccccggggcaaggtcggccgcccacaacccgcgccatccccggggcaaggtcggccgcccacaacccgcgccatccctggagcaaggtcggccgcccacaacccgcgccatccccggggcaaggtcggccgcccataactcgcgccatccatggggcaaggtcagctgctctctagcgtaaccagatgaaccaggtcagtttctctctagcgtaaccacacgaaccaggaactgctgcccgacttctgcggggcacatatccaaggacaccaacctgctgggttcccaattccttccctctccttcaccttcaactgctgtggctgtgagttaaaatggcatctcttgggaacgcttgtacctgctggtgggagtgtaaattagttgaaccatcctggaaagcagtctggcaattcttaaaagaactaaaaacagaactaccgttcgacccagcaaccccactactgggttatgtccagaggactctaaatggttctaccatgaagacacacgcactcaaatgcccactgcagcaccactcacaacagcaccgacatggaatcaagctggggcctgtcagcggcagacggataaagaggatgtggtccatatacaccgcggaatactatgcagccataaaaaggaacaagatcatgccctttgcaggaacttggatggagctggaggccattatccttcgcaaactaatgcggggacagaatcccgggcactacacttccccacttacaagtggaagctgaatgatgagaacacagggacagaaaggggccaacaacacacactggggccggcctgagggaagagggagaggctcagaaaaccattttaacaaaactgtcaggtacccatgcttggtacccggtgctgaaatgatctgtaggacaaaccctagtcactagtttacctatataccaagcctgcacacagacctgaggctaaaataaacattagcatatttaaaaataaatcaacaaagcctgcacacctgcccgaggctaaaataaacataagaatatttaaaaataagtcaacaaacagtatcttttggtaaatttacccgacagctgaagggataaacaattgtgctggagacacacagggaaaaccactcagcgataaaaggaactgcggacgctccaggaggagtctcccagcctccgtggtgaatgaattcaagcggttagacagaaagtgcgcactgtgattccacatacgtaaaactccaggaaacaccacctcacctaagtgcagcccgcagatgcacgggtgccggggatggggtggggtggggtgggagtgggggcgaggaggcctggttgcagagccccacagtgccgtggtatcttctgtgtcttgactggtcatagttcattcatgtcagacctcaccaaattatacattttacataaatatttaaatgtaaatgtgcaattacatatatttattgacataaaagcattttaaaaaatggctgggtgctatggctcccacctataatccccgcactttgggaggctggggcgggcgtatcacctgaggtcaggagttcgagaccagcctggccaacaaggtgaaactccgtctctacaaaaaatacaaaaattggccaggcgtggtggcgggcacctgtagtcccagctactcatgaggctgaggcacgagaattgcctgaacccaagaggcagaggctgcagtgagctgagatcgcgccactgctctccagtctgagcgacagagcaagactctgtctcaaaaaacaaaaagcgtaacttggggaatgtgacttctctggcggcgatacacccatggaatactctgaagcagagctgggaatccacacggaattctaccctggaaagacaacgacagtgtctcagtgggtgacagcgaggtgacagctgccgctgctgactcagtcttcattcctggcttgaaaggctccaagccaaggtttgagaggttcagtaacgtgtcccgggccccgtaagaggtggcgtgtgaccccaaagcccaggctttccgagctaagccacaccgtgcccctgccaggtgacctcacgatgtcacatgcggccagcagggcctgctgtctagagggcttaagggagcagaatgctcatcaccccccgtttcactgtgaaaattcacccttgaccagggactcatcactgaaaaccaaaactgacaaatccctcgtcaccgtagaagtggctcaaaacaaggaacactgtgtttatttcgggggagatccatttttgctggttaatcactgggcaaatatttatttatttatcgagacagagtttctctcatcgcccaggctggagcgcagtggcgtgacctcggctcaccacaacctccgcctcctgggttcaagcgattctcctgcctcagcctctggagcagctgggattataggcatgcgccaccacacccagctaattctgtatttttagtagagacagggtttctccatgttggccaggctggtcttgaactcccaacctcaggtgatctgcccgcctcggcctcccagagtgttgggattacaggcatgagccactgcgcccggcaaattgggcaaatatttatatacaaattcctaggcacggcaggcatcagggtgaatgctgaacaacataaaagttccccatcacacagctctatggctggcccctctacccacgggaaggctcgcgttgtacggtttagtgcctcctgacacctttgccttgatccctgaagaacaatcgggttgaaggcgctatcacaacccgtgccatttgggagctgctaaatgttcagtgacaaattcaactggcattaaaaacgtattgctataaa

SEQ ID NO: 334 - DNA, 949 bp, Homo Sapiens
gcgctggtgtgggttagggctgagaaagaacgacaggaacagagacgtcgcgaggattaagtttaagacttcgcgagaacagaatttcttttggcacctcctctccgcgcgttcttgggggttgaaaggaggagcaggaggtactgatggacaaggaggtaccttccggtacacctttcatggcgatcctcatgctacatttgctgcatttttcggagggtccaacccctttgaaattttctttggaagacgaatgggtggtggtagagattctgaagaaatggaaatagatggtgatccttttagtgcctttggtttcagcatgaatggatatccaagagacaggaattctgtggggccatcccgcctcaaacaagatcctccagttattcatgaacttagagtatcacttgaagagatatatagtggttgtaccaaacggatgaagatttctcgaaaaaggctaaacgctgatggaaggagttacagatctgaggacaaaattcttaccattgagattaaaaaagggtggaaagaaggcaccaaaattacttttccaagagaaggagatgaaacaccaaatagtattccagcagacattgtttttatcattaaagacaaagatcatccaaaatttaaaagggatggatcaaatataatttatactgctaaaattagtttacgagaggcattgtgtggctgctcaattaatgtaccaacactggatggaagaaacatacctatgtcagtaaatgatattgtgaaacccggaatgaggagaagaattattggatatgggctgccatttccaaaaaatcctgaccaacgtggtgaccttctaatagaatttgaggtgtccttcccagatactatatcttcttcatccaaagaagtacttaggaaacatcttcctgcctcatagaatgaagaactttgttacacatatttt

SEQ ID NO: 335 - DNA, 411 bp, Homo Sapiens
gcaaaaggagcagctggctccaggctccaacgtgccttccagctgcctgactgcctcttcgcctctcccgtcatttcttggctcgaaatggaccccaactgctcctgcgccactgggggctcctgctcctgtgccagctcctgcaagtgcaaagagtgcaaatgaacctcctgcaagaagagctgctgctcctgctgccccatgggctgtgccaagtgtgcccagggctgcgtctgcaaaggggcgtcggagaagtgcagctgctgtgcctgatgtggggacagccctgctcccagatgtaaacagagcaacctgcacaaacctggatttttttttcatacaaccctgagcatttgctacattcctttttctattaaatatgtaaacgacaataaaacagttttgacttga

SEQ ID NO: 336 - DNA, 1053 bp, Homo Sapiens
agcgacagggagggatgcgcgcctgggtgtagttgtgggggaggaagtggctagctcagggcttcaggggacagacagggagagatgactgagttagatgagacgagggggcgggctgggggtgcgagaaggaagcttggcaaggagactaggtctagggggaccacagtggggcaggctgcatggaaaatatccgcagggtcccccaggcagaacagccacgctccaggccaggctgtccctactgcctggtggagggggaacttgacctctgggagggcgccgctcttgcatagctgagcgagcccgggtgcgctggtctgtgtggaaggaggaaggcagggagaggtagaaggggtggaggagtcaggaggaataggccgcagcagccctggaaatgatcaggaaggcaggcagtgggtgcagggctgcaggagggccgggagggctaatcttcaacttgtccatgccagcagcccctttttttccagaccaagggctgtgaacccgcctggggatgaggcctggtcttgtggaactgaacttagctcgacggggctgaccgctctggcccagggtggtggcagtgctccttttggacttttctctagtgttcctcatggcgagcagatggaaccgggagacatggagtccctggccagtgtgagtcctagcattgcaggaggggagaccctggaggagagagcccgcctcaattgatgcctgcagattgaatttccagaggcttaggaggaggaagttctccaatgttctgtttccaggccttgctcaggaagccctgtattcaggaggctaccatttaaagtttgcagatgagcttatggggggcaatcttaaaaagtccacagcagatgcatccggctcgaggggccatcagctttgaataaatgcttgttccagagcccatgaatgccagcaggcacccctcctttcctggggtaaaggttttcagatgctgcatcttctaaattgagcctccggtcatactagttttgtgcttggaaccttgcttcaagaagatccctaagctgt

SEQ ID NO: 337 - DNA, 590 bp, Homo Sapiens
gcaacccgcccgggtcctcttccatgctgtggaagcgttgttctttcgctctttgcaataaatcttgctactgctcactctttgggtccacactgcttttatgagctgtaacactcaccgcgaagatctgcagcttcactcctgagcccagcgagaccacgagcccactgggaggaacgaacaactccagacgcgctgccttaagagctgtaacactcaccgcgaaggtctgcagcttcactcctgagccagcgagatcacgaacccaccagaaggaagaaactccgaaaacatctgaacatcagaagggacagattccagacgcgccaccttaagagctgtaacgctcaccgccagggtccgcggcttcattcttgaagtcagtgagaccaagaacccaccaattccggacacaatgtgaagagcatttaaaatagtgcctaagcctaggacaccgccagtgctttgtgttttcacagtcctgtgtttggtatggagagtgtggaattgcatatggggacaagaggtacaattgcgaatattctggcccaccaaaaccattgccaaaggatggatatgacttagtgcag

SEQ ID NO: 338 - DNA, 4160 bp, Homo Sapiens
ggtacctctgtttggtatcacatccatcaagggggaaaggtcttctggctcatcccccctacagcccacaacctggagctgtacgagaattggctgctgtcagggaaacagggagacatctttctgggtgaccgggtatcagattgtcagcgcattgagctcaagcagggctataccttcgtcattccctcaggctggattcatgctgtgtatactcctacagacacattagtgtttgggggcaattttttgcatagcttcaacatccctatgcagttaaaaatatacaacattgaagatcggacacgggttccaaataagtttcgctatccattctactatgagatgtgttggtatgtgttggagcgctatgtgtactgcataaccaaccgttcccacctaactaaggaatttcagaaagagtccctcagcatggatttggagttaaatgggttggagtctgggaatggggatgaggaagcagtggatcgagaaccccgacgcttgagcagcaggcgttctgtcctcactagccctgtagcgaatggagtcaacctggattatgatggactgggcaaaacctgccgaagtcttccaagtctgaagaaaactttggctggggactcatcttctgactgtagccggggctcccacaatggacaagtgtgggatccccagtgtgctccccgaaaggacaggcaagtgcatctgacccattttgagcttgaaggccttcgctgccttgtagataagttggagtctctgccactgcacaagaaatgtgtccccacagggatagaagatgaagatgctctcattgctgatgtaaagattttgctggaggagcttgccaacagcgatcccaagttagccctcactggagttcctatagtacagtggccaaaaagggataagcttaaattccccactcggccaaaggtgcgggttcctaccatccccattacgaagcctcacactatgaaaccagctccacggttaacacctgtgaggccagctgctgcctccccgattgtgtcaggagccagacggagacgagtgcgatgtcgaaaatgcaaagcctgtgtgcaaggagagtgtggtgtttgccactactgcagagacatgaagaagtttggggggcctggacgcatgaagcagtcctgtgtcctccgacagtgcttggcacccagactgcctcactcagtcacatgttccctctgtggagaggtggatcagaatgaagagacacaagactttgagaagaaactcatggaatgctgtatctgcaatgagattgttcatcctggctgcctccagatggacggagaggggttgcttaacgaagaattgccaaattgctgggaatgtccaaagtgctaccaggaggacagctcggagaaagcccagaagcggaaaatggaagagagtgacgaagaagctgtgcaagccaaagtcctgcggcccctgcggagctgcgatgagcctctcacgcccccgcctcattcacccacttccatgctgcagctcatccatgacccggtttccccccggggtatggtgactcggtcatcccctggggctggccccagcgaccaccacagtgccagccgcgatgagcgcttcaaacggcggcagttgctgcggctgcaggccacagagcgcaccatggtacgggaaaaggagaacaatcccagcggcaaaaaggagctgtctgaagttgagaaagccaagatccggggatcgtacctcactgtcacgctacagaggcccaccaaagagctccacgggacatccattgtgcccaagctgcaggccatcacggcctcctctgccaaccttcgccattccccccgtgtgctagtgcagcactgcccagcccgaaccccccagcgtggggatgaggaggggctggggggagaggaggaggaagaggaggaggaggaggaggaagatgacagtgcagaggaggggggtgcagccaggctgaatggccggggcagttgggctcaggatggagacgaaagctggatgcagcgggaggtctggatgtctgtcttccgctacctcagccgcagagaactttgtgaatgtatgcgagtgtgcaagacgtggtataaatggtgctgcgacaagagactttggacaaaaattgacttgagtaggtgtaaggccattgtgccccaggccctcagtggcatcatcaagaggcagccagtcagccttgacctcagttggaccaacatctctaaaaagcaactgacatggctcgtcaataggctgccaggactgaaagacctcctcctagcaggctgctcctggtctgcagtctctgccctcagcacctccagctgcccccttctcaggacccttgatcttcggtgggcagtaggaatcaaggaccctcaaattcgggacttgcttactccaccggctgataaaccaggtcaggacaatcgcagcaagctccggaacatgaccgacttccggctggcaggccttgacatcacagatgccacgcttcgcctcataattcgccacatgcccctcctgtctcgactcgacctcagtcactgcagccaccttacagatcagtcctccaatctactcactgctgtcgggtcttccactcgctactctctcacagagctcaatatggcaggttgcaataaattgacagaccagaccctgatctacctacggcgcattgccaacgtcaccttgatcgaccttcgaggatgcaagcagatcactcgaaaagcctgcgagcacttcatctcagacttgtccatcaacagcctctactgcctgtctgacgagaagctgatacagaagatcagctaagacacacccagcccagattcaacaggaaaccgatcttcccctgactccccaccgaggagagcctctcctcgaccctgcacgggctctgaggccagcgtcacactccctctctgctctcctgtcccttgagcccttcctctacaggtggggcagagagggtggtggacaccaggcttatctgcctgctcctctccctcctaaggaaaagggagtagcagattgatctgaggggaaagcacaggctgtgctgtcgaggcgcctgctcgcttactcgcctgccaggaggccgggctctcagtttggggtgtttgtgcaaccttcatctgcactgggccctgtgcccctcctccccatccatggtccccagcagtgcctggttctgagcaaactcccagggaagaaaacggccctgtctccatggccaggttcttgtggtgtccagtgcgcgtctctcctccatcacactctcccggcttgcgcaggaggggccagcagccccaggagtcccagacccgtgccgatcacactggtgctgttgagatctcccaaacctcacgtccttaactgtgctctccctcctttcctctcccttgagcttggttctgcccagcactcgtgcttgttcacataattaggtttcccaccccagcctacccgacttacttgctagtctctatgaggtccttattgcacttattggggttgaagctcttcagaggagctggaactgtctaccccagggacacacccatttcgttgctacccaagtggattctgagacaggcaccatctccttgttccccctctctcttttgcctcccactgactgcccttttccatgtgtcttcattctgcctgaagaaggctttcccaggatgcacgtcctcagagggagcagcctatctcccccaagctggaggcggcagaggactgggccaagccccaacctgcctcccagccaggctcctccaggcctctggtttagcggagccccctgagcccaggcctgtgtctagccccagtggctcactgaactttcagggcagtcagggggtcctgcttagaagccagtcaccagccctctgcctgcagccatggaagggggtgtgcacgtgcctctgtgtgtgtggctgagtgtattctgcgcgtgtgtgtggagggagggagggaggggagcatggtgtctcccgctccaccgccctttgttgagccccatcagctgcccccttttactttgcattgaacggcctgtccaaagatcctctctctagggcagcagagagctttttgcactttaaaaaaaaaaagaaagaaagaaa

SEQ ID NO: 339 - DNA, 3222 bp, Homo Sapiens
atggaataggccaatgatgcagcaagagaattgaaggttagactacaggcaggacttcctagagatcaggtttattccactggctgtgcactcccattccaggcccactgtttatcccccatcttccctgccctctcagcatctgccttcatacctgtccctgcactttcctaagcctgagatgatgggaaatttcctacttttcccagatcctcccacctccctgccatcataacccccatctcccccactgtgtctggatatcattccctagggtcagagttgggagaggagtggcacaaccagatgcttagggcctctctctgacctttcagagggaggaggttcttgatggggccagattagaggtgcggagaccagctccaggcattggggtgcttgggaggactgttctggggctggagtggggaccattgggcaggagcagccagtgcccaccgggtgctgggaagactgtttgccatgcatctgagctgtgccagggcctgggcctggcccccttctggtgccctccctcccttctctctgggctggagctggagctgctcacagacctggctcccatctctctgacgggcagcccagagacccatatagttggagtcattttggggccaacaccctggaccaccctttcacctctgtctgacagtgggagagtgagggaagagggcctaaggccaatgaggacctaactgctctggaacatggagggcaacctacccttgaccccaaaaatgggagtcactgaccagtgaggccaagagggtagccccgtgcagttctgagagagctctgtctctccagtctcgggcctcagcctcccaattgcagctaggagccctgaggaaactcagacttccccacatccggtaccagcctcagaacccaggggtccagggttctgtggccttctctatcccacacaccactcatctccacttcctcttctcttcctccagagcaggccacacctctccaactctaaccctgagagctcagcagtcatgcggtccgttcccttgacgccacaacatccccctctctgtttcagctccagcgtctgtatctctgcccttgttttgaatttcttgagctgttcaggaaactttcctcttgtcacatcatttctgtctgacccgggatgtccatctccctcacagtcttcatagacccaacccagagagttaagaccaggtctctctctctctctctctctctctctctctctgtgtgtgtgtgtgtgtgtgtgtgtgtaggcatgcacgtgtgtacacacatctaacaacacccaccacctccatgctgaatgcccatcagccggcagccaaggtctgtcccataggaactgagctccagcactcagcagggtcagcagggaggcacaagaagccagagctttggctatagcaggagggaagctctctgctacccccttaacggcttcatgaggagcaacatgagcctacacaatataagcagggccttagggcctgtagaagtaattgcaatcatcatataaatagtcctttttattggaagcaaaactaataatactattagcaatgacaccagccgagcagttgcagatccctctcgtatagaatctgaaatgtggatgatgctgttataaatagcaaagttagccatagcaacataggcactggtaatactgtgggtgggtctaagggtaacactgttccctgatcttactgtcatcatctgcaatctaagtaatgcagataataatggtgccccttggacttgacgccaatctcttggtcctattagaaccatgtaggcagagctattccaataggtgggggaatacctgacaggatatggaaatacctgggagagggaattcccaggcccctggcagtgctaggaaggaatgcaatagtggtaaccgaattccagctaatagttactgatgtctacctgagccagttctcctaaatgcttcctgtggataacctcaactgtgagaaaaagattgtttatgttttgctcattacaccgatgaggaacccgaggttcagagaagtcaactaactaccccaaggtcacagagcaaggagccgagttgggattccagccgaaatgggcactccgaccaccccctagagcggctctgatcggctgtcctgccggactacagtaaggtgtccccagaagggttgctggccgctgctcctggagctgcctgtgcgtgggggcacggaggcaaggactgatccggaacgctaccgccctgcctgggacaaggtcggaaatctcggcggccgcgctgggacaggagcgcgcagcagggaagatgcgaggacccgaggggttgctgatcagactgcgagcagcaggggggctgccactggcagagctggaagcatgtagatcagagatggcagcagcagctgcaggcgctcggggctgtccagcagcctaccccgctgcggtgtcaggagtcgacgagttgggtgccccagagcctcgaggcaagggctgacaggcggggggcgcagaccaggcaggcactcccttctccctgtccccgaccccacggcgggcggcggggctgcggaggcactcacctacccagggctggggttgggtcgcggcactgcgaagtttgtcgcctcctccgggggtctcctccgggtgcacggctcagtcctgcagctgcagctgagactgcggcggagactgcgcgagcgtgaggagaggctggggccgcaggacattcggaagagggcgccggccctcccggcgcagcacaaaaccccctttcttccccccgcccctgccccgccctccccggggccgcccccgccccctggtcgggagcgcggggctctcgggacggtcacgggacccgctgccttctctgcttcggctccggcagcagcggcgagagcaaggacgagcgaagtaggacatcgttcagcggatgagaagccgagggcttggagtagggaggaggggcaggaggggcggggagggagcgttcgcccagcgttcgctgagctaaaggatgacgatgttgcagctggaggggtggaagttggacaactggagagtcttctcgttgttcaaagaagaaggaggagggagtcaattagactgtaagaagtggatgaagggagaatgggggctttgctcctgaaaagagacaccctttctaataaaaaaaatggaaaactc

SEQ ID NO: 340 - DNA, 758 bp, Homo Sapiens
tgtcagggacagggcagtattccagcttcagcctgtctacctctggagctctcctgatcaatacatcagagaagatgatggagccctcctgccgctcttggggagagttgcgtcgctgctgtcatcgatgccgtgctggacctcacagcgatagatacctgagtcgttggggcgcagctcgctcagcgccagggagacgtcggtgagcgacgctgggtacgcaggcagtgccacgcggaaccggtaggcctcgttcaccttgacgcgcactccccgcgccaccagcacctctgcctcccggccccgggacaggaaagtccacttgacccgcggagagcccagcacagcccggcggctcggcggtggccgcaggtagtggacgtggcaagggatggtgagggcgccgccgagcacgccctgcagtggcgcgtcgcccgcgatgcgcacgcgaaaagcgcggtcctctgtgaacgggtggagccggctggaacttaacgctgtcgaccctcagagtcccacccggtggcctccaagccccgctccaggatccctccttccggccccaggattccccggcccccctaggaccaggggccaggggccaggggccagggtcctgcagccctacctctaggtcctccaggaccaccccgacggtctccagacccatcccccaaagtctcccagtcaattcagcccccaggattccttgccctgctctcagagtcttccacttcctctccaaaattcctagacca

SEQ ID NO: 341 - DNA, 718 bp, Homo Sapiens
ggtagacctggcgacgacggggctgcagctgcaggggctgagctggctgggcaagcgcgggccgcggaggaggtctcagggaggatctcctgatgcagtccagcaaagaactttcacatgtggacctccctgaagattttctaaggagcaaagaaggaaatgtacagattacagctgaaactctgctaaaatccgccgaagtacaaggtatgaaggtcaatgggactaagacggataataatgaaggacacaaaaatggcaatgtgagtaaagatctctcagctggatgcggtgaattccaagaagtagacaaaatcatgaccagtgatgaggtttcagaaaccagcacattagttaccccagaacctttaacctttgtggaccctgtattaacagaagcaactcctaaagaaaaagaatgtgaagaattaaaaagttgtccttggttgtcattaccaggaaacagtgccatttctaatgtggacaatgggaaggaagagttgtgtaaaccaaacctggtctgtgaagcagatgacaatcaccaacagcttcatggccaccataatgaacaacccagttctacacatgatagtcccacagccacaagccctttgaaagaaaattctgaagtttcatgtttcacatcagacttgtctggtccagaatccagaacaatatccttagaaaactgtggttttgaaggtggtggtttgctaaa

SEQ ID NO: 342 - DNA, 513 bp, Homo Sapiens
agatgggctctggtcgggagccggcccaggaggaaggccatgcgtctctgggtctcttctcgcccaagtgaggcctgtgtgcccgccttccgtgatgcagcctccgagctcccagctcctccagcagccgacaggaggcccgtcaagatgcaggcaggcattgccaccccagggatgaagacagcagcccaggcaaaggccaagaccacaggagcctcccggtctcatcctgcaaaagctaaaggctgccagaggccccccaagatccgtaactacaacattatggactgacttcctccccccaccccgccccactaaggggtgctcggggcctccgcatggtgcctgtgctttcacctacgtgttgtgggggggtgtgggcacagcgtgcagggtggaggcagggagctgcagggcaggctcccaaatgctgctgaggcgaccctgctgactgaaggcctccctgagcacagggcccattaaaaccaggttcctccctggggcgtctgcttg

SEQ ID NO: 343 - DNA, 1069 bp, Homo Sapiens
cctccctggccctggaggcttgtccagattgcgccgcattcccgctcatcgcacactgccgtttctaacattttccgtggctttctagatgacctgttgttcatgcacttcacttagtgccctcttggacttttgggccgaggtttgctggttggctcccgagcagacagcaggaaagaagaagcccttcgtgtacacccagggccaggctgtcctaaaccgggccttcttcccttgcttcgacacgcctgctgttaaatacaagtattcagctcttattgaggtcccagatggcttcacagctgtgatgagtgctagcacctgggagaagagaggtccaaataagttcttcttccagatgtgtcagcccatcccctcctatctgatagctttggccatcggagatctggtttcggctgaagttggacccaggagccgggtgtgggctgagccctgcctgattgatgctgccaaggaggagtacaacggggtgatagaagaatttttggcaacaggagagaagctttttggaccttatgtttggggaaggcgctgcgtacacctgcttggaggctgcaacggggcgggctctgctgcgtcagcacatggacatcactggagaggaaaacccactcaacaagctccgcgtgaagattgaaccaggcgttgacccggacgacacctataatgagaccccctacgagaaaggtttctgctttgtttcatacctggcccacttggtgggtgatcaggatcagtttgacagttttctcaaggcctatgtgcatgaattcaaattccgaagcatcttagccgatgactttctggacttctacttggaatatttccctgagcttaagaaaaagagagtggatatcattccaggttttgagtttgatcgatggctgaatacccccggctggcccccgtacctccctgatctctcccctggggactcactcatgaagcctgctgaagagctagcccaactgtgggcagccgaggagctggacatgaaggccattgaagccgtggccatctctccctggaagacctaccagctggtcta

SEQ ID NO: 344 - DNA, 512 bp, Homo Sapiens
gtaagaagtgccttttgcctcctgccatggttcagaggccctcccagccatatggaactctaagaagaaatttcctgacttgtttgtcttcttggaagattcctcctcatgtctcaaaatcttcccagtcagaagctctactcaatataacaaataatggaatacactttgctcccctgcaaacatttacagatgaggaaatgatgataaagagttcagttaaaaaatttgctcaggaacaaattgcacctttggtttcaaccatggatgaaaattcgaaaatggagaaatcagtaatacaaggattatttcaacaagggttgatgggtattgaagttgacccagaatatggaggcacaggagcttcatttttatccactgtgctcgtgatagaggaattagccaaagttgatgcatctgtggctgtcttttgtgagatccagaacacattaattaacacactgattagaaaacatggaacagaagaacaaaaggccacctatttgcctcag

SEQ ID NO: 345 - DNA, 573 bp, Homo Sapiens
agatgaaatatcaggaggaaagggaagggaggatctgtaattgaaaataaaagagtgaattatgaaaactgattaagccaaacccatcgtattcatatattcatgtgtaatatttaagaaaccactgcctaatccaaggtcatgaagattaacatctatgttattaaaatgaagttctgaagaagctggatttatgtggctatggtaaatgtatctttaaaaactcttgaaggaaaaagcaataaaatctacactaaattattgaagaagtcaaaataacaaatgcacttatggataatgttaaaagtctcaaaaatgtactagcttcattgcagtctgaaaaatccagtttgaaagtgagatttcagagcttcagcagaaacttagtcattactaaactgcatcaataaaataaaatgattatgcaagattcaatttaaagtgatttactatggaaagagaagaatctttccaaagcagatgaaaaaatcagtcatgcatctgaagtgctagacatcttcagaatcctagccaaaattctctctctctctgtctctctctctctctcttttt

SEQ ID NO: 346 - DNA, 2748 bp, Homo Sapiens
ggctgatgttcacttttgaagaggaccacaatgaaacccttttaatattactcaatgattccacagacctcctgggtgttaaatcaggtgaatctatttttaaaaattgctatttacttttttaggtggctgatcaggacagtatgaaatttcatacagtttcctaacttgagaaaacatggtgatgcaattcctccaaccaggagggatttatggacagcggtggctacgtcctaatctgcccagaatacaggatgactaaacaaattggcaaacggacgcagctttctctctctctaagaaaagtctgctgagaaccctcgttcccactctgtttctgcctccaagaagaaaagcctaaaactcactttcttccggactctttcaaggaagctgattaaaagaagctcctaaaccagaggtgcagacaaggtgatgatgtggctctcagaggaaggtgtgctacctacaaccctgctggcttcatggaagaatatgcttctcaaatgcaaatccaatcaagttatctccctgcttaaatccaaactcgctcatgtggcccacaaagcctaccttgcctgcctctctctaacctcacccaaaacacacttccattgctctctaggttccagcaccctgaccttttggtctgcactgtgccaggctccctccagccctgaagcctttgcacatgctgttcctcctgtctggaaaggctctcccatcttgtctattcgttctccaggctcaagtgactcttcctgagagccttctctgaccccagtccaggtcaagttcctctgtcacatgcctgaccctgcatccctccttgacagcacttatatcagcttgtaacacatttttgtgtgattattttgttaatgtcagcctctcccacaaactgtaagctcagtgagggatggaagcatgcctatttttaatcatcatggtatcctcagcactcagcacagcacatggtacatcaggaatgctcataagcattaatagagaaatgactgatttgagtcagacgaagactcagtatgccaggacgttcaggccgagagtctaagaggccgccggagggcttcggaaccagtgagcccactcaattcagcctgctcagtaccctgtgtgtactttatcaggaagaaggtacagtccctccctcccctatccgtttcccaaccacaggatcaaaataacccggaagcattacctttgcatcgagggtgagcagcaactcaaactcgttgtaaaactccttggggctgagcaacgggtactccttgactgtgcccaggaatgtcgcaatgtcgttcaaggcgatatcaaccccttctcgagactggcacttgtctacagcttgggaagccaagaggtagattcctgcctcacaccattggctgaccttttggaaagaaacagtgccctgtgcacttcgcctgaccacaactcagagccaccgtaatcctcagcaggtctgagcttgtaaggtgtctacaaggattcccagacaatgggaaattgtcatgggacggcatcgagtttaaggggtctaaccactgtaaattacactatgagggggacaaacccaaaccagctgatacctgtccacttctcagggaagtcactcggtcagcaaaatgagtctcttccattaacagtaattgctacatctccaggaggagacagctaaatatatatttaattaaagacagggtttcactctgtcacccaggctggagtacagtagtgcaattatggcttaatgcagcctggagaggtctaccccaggctcaggtgattcttccaccttagcctcctgagtagctgggactacagatgcatgccaccacaccaggctaatttttccttccttcctcccttccttccttccttccttccttcctctttctttctctctgtctctctttctttctttcctttttttgagacaggttttggccatgttgccgaggctgctctcgaactcctgggctcaagcaatcctcccacctcggcctcccaaagtgctgggattacaggtgtgaggcactgcacccacccagccttatagctaaatatctcttaggctggtctaaccatagagaaatgtaatcaatggcttttggggtttacctgctagtccactcttcttgcatccgaattggttaccagaacacagggtgattaataagacattagacctggcccttacatttcctgggagaagggcatgtcccttttaacaaaaacacaactttcatctttggattcccaggtgatccctatttgcatttactggcgtttgtctttcgtaaggaagcaagaatgcaaagctttgtaactcagcacagcgatactcaagagtttctggatgctgggaggacattagataggtgatgagttctaattattcaatttttaaaaaagactcattttctttgctcttttgaactccactgagacacttgaacagaaagacagggagcccttatgctacctgaagagttatatgaaaagaagtttccagtgccaatacctctgcatttccatttaccatgtgacctgaaaagcaatataaagtaactatacagagaaaaaagatcaaaatgcaacacgccaaagtggttgtctttctaagtgggaaaatgataggcaacttaagtttttgtcttatttttttcctagattatttacagtgaatatgtaccacatttagaataataaaaaatcataaagata
